United States Patent Application Publication US 2008/0274467 A1 - sequence listing, part 8

SEQ ID NO: 1032 - DNA, 31761 bp, Mus musculus
  misc_feature (1)...(31761): n = A,T,C or G
tccacacacctttaattcctctggctggaatgtacgcctttgatccacctggctggaatatagacatgcatttagtacacacctttaattccaagcaataacatctaattgaagggcagataaagtgacaaattagagaaacatttgacagaatcactcagaggtgttatacacccaactcttatgagagcagacaggaaagataagatacttaaagagcagtgagggacagagaatggagttccatgcaatgcaattcagttcagttctgttcaattcagagcagttcagttcatgcagtttagagaaagtctttccaaatagagaaattgagacagaagcccaaagacaccaatctgaatcagtctgcttagagaggagtttaagctagatcaaacaagttgaaccagccagccagagttcagaaagagctagaaagaatgagcttgttcagcagtaactctcagaggtaaaacaattcttgacctaagttaaaagacagaagctggaaaccgaaccttcaaagtccaggcttgcagaagattagattgtatggaggctagaagcttctaggcctaggcttaggggtagttagatagaaatgttctgggctcagcccaagcagtgtatttacacagcttggggacatctcttatctcatcatctgaggaaataaaagtgacattttcatttacacagataggtaccatttctattgtaatacctcttcttccatgactaagcctgtgaaggactttgattttcaatggatccaacccatcattaaaatggatgcccttctgaacataaggtggttagcaatgactgtgtgtaggattctgtgtgcctcataaaatgtccagatttgtttctcaaagacagggtatttattctctgcatattggaaagctcttgcaatagaagtcaacaggcaaatgttggtggactacctttcaatttatgaagagtctccagttgtcatattcatccttaaatatgatacccataattaagtatcacctggttgtaatactggtcagggctgtatgctcagagatgaccatacaggctgtctcaaaagcttccttattttcctgttcccattaggaatcagctgcctttctttccaagaaactttgcagagatatttcatcattgtctgtaaatttggtatgtgaatcctccagtatatatacatgcaaattatatgttgcatctaagttttgtccttgggtggtatatatttaaaatcttgagcaatataccatctgggaccttgggtctttcagatgtacataacacatgtagaaattttgttgatgtatctgacccttagccttgtctttattaatgaagggtttagctatcatgtaccagaatatcaattactgtctccatataattttgaagagtgtccttattgtatcttgcaatcaaaatatcatctacatagcttaaaaggaggcaatgtgatttaattcaggtagattttccattgaccatcttagtgtcacatggacaataattgggccattcttagagccttgaggcagttttttttaatctgcattgtttattattccaggtaaaagtagtaatgtttctagattctacatggagtgctatgctaatgaacatatctggtaagtctatggtgccaaggaattttgggatgtaagtcttaatctttaacaggtaaatttcctggcatttgtggagaaagctgattaatattcctacagtctaatgtgattctccattgaccatttagcttttatactggccaaacaggactactgaggttgaaggattgtgtgggttcaataacatcttcctttattaattacaatgtcatcgatgattttatcacctcccttaatagagtattgcttggtcaatgatcacttaattttaaggtgttccaaaggaggatttgtacttgggtgatattagagtctaaggatttaaattttttaatgtaatgccattagggaaataatttgggtatgacattcatctcaagcatgcaactaggttctactgtaaatattgtgggaatatttagagatagattatagactaataattctatattttctattcttactttaaatggttttccaacaactccttcaataattacatcatttactgcatttggtaacgtggacagagggttcaaattctcacctctctccctatatgtataagccaatttatatgttgaaccattctcctgatctttctggggatctatatgaagggctctggagtccttccttcattttaggttgttggttctgtatatactttggtctgtctagtaatctctttctgaatcctcctcttttgggctgtcttttggtatctaatatcattgtccaaacagtcttatatctttgattttctgaaagattggagggttacatctggtcatggtcttgccctgcctttgcctaaaaatatgaccacctttttagtgaatttttctcagtgctggtttggttctatatattagacttgaaggatactatcttatctgtctccagttttttagtctgcttgtagaagtttgtggggagccaataaacgccattacaagatggcttattggtttcaataagccaatgcacatgaatatgggtaaacaaccaatgtgtgcactgcctggcccgaggcatgtaaatgaggtactgaaagcataaccaatcaggtatagacacgccactcctaggcctatataagcagcgccagttctggggctcgttgtggcgttcttcttgctggcgagttgggcatctacagaaattaatagcttctctaacagtttggcaattgttcaggttgatgtcaatgtcattctcaaacgtggcattgctcctttcatattcttccattgtccttctgcctcaaattgaggcagaccaaatgtgggggaacctacctccacgaagctgttacccaatccaataaagtgtgggtttgccctcgggctgtatctaaaattctttctagactttcaaacatgtggggatgttctagaatccctttgacaacatcactgtacaagctcccttttctcataagcgattatatagtatgcatcctcgtctcctctttgtgcaaaatcttttcttatttgttgcagtttggtccttgtaaatggtctggattctacttcagtggtcacgtgagtatgactggttaaatggctagaagtagccttaaccttatgggcagatcttgatgttttcaaggcccattcattataagctgcctctgagtcctctctggatgggttgtttgtccacctttctgccaaatagctggctagctatttacctttcattctgttgaagtcagtgtctttaactattttgcataagaacccagaaacctctgaggtgttgccttctcttactaagagctcagccaccacatgagtggacagcgaagtaatcgaccttaggttccttctggtgcttaggttacccttgttgaactaagctgcatattttgtcccttctacaatggggttgtttctcgacctttatattcactttcctcattcctgcattttgtccctttgtctgccaaataagaatttgacatctcttttctgaggtgccaatttaggtggctggtagaggaggtctgtgatttaggagcgtttcaaatgtaagatctgcccttcttactcttggctatccaatccctcatagaactcaaagcaaactgctcctgctacccagtttttttgttttgttttgttttgttttgttttgttttgtttttgtttttgttttttttcttttccagacagggtttctttctctgtgtagccctggctgtcctgctacccagtcttaaagcagaatcctgagccttcctggtagttagttcctgctacagaggatcctccccagggctctggttccttccttcctgggaccacatctctgctccctgtcctaaagcctgtgcctttgtggaaggaagtcctgccgtcagaattctcccttctccctggggcaaggtttatctgttttactcactactgtatccataatgtgaaaacactaaaattaggtacctaatgccaattttgaaaataaggaagtagagctcggtggaagagacacaggggaccagaaggcaagggattgaaaaacaagggttggggagaagaagcaaagagggagatgtgtagaaatggaaacaagaggaggagagaggctgaggaaaagaagaaaaagaggagtggatataagaagaaaggcaataattctcagagtttctgagaataggactacttcgactttaaaatcactgttctcattcatggtctgagcctgctttgggacctgggaaaccataaagacagtcagctgtatgaaaaggatcgccaccatatattagtgtctctttattctcccgactctcttgcccatactttgccattagcaacaacacaaatacatttcacatcaaacaagtagattccctctgcagctttcagcttttatgttataatttagatgtttttaaatgataatgcggagagaagagggagaagtagacgcttgattagcgtccctcactagcagcctacttgctttcaaagaatcttcattcatgctccgcagtttgttttcttacttcctgccctgttttcttatgagactttccataataaatcttctaaaatccctcaccaatttccagtcaccaattccattcgaaagcctaccacaatgctggcaggtgattttcactgctccgagagaagatcaagacgatggggatattaattccttcattttcctttaatctcttcttctcaaaaataaccatcttatctccaagggagaactgccattttcctttcaatcgcccactgagcaccacagtcataactcggaagttgaaggaggttttcttttattcttaggatctaaataagattgattcgtagtccaaatttacaccggatgaagtccaaagtcattttaaaagtttctagaaacttcagtgcataaattctcatagttaacctgtgaatctaagcttctgtttctagtgttcctatagtatctatactgactcaagagtaaggtgaaagacctatgaattattacttttgttttaaaaaaaggaagtaaaaggaaaaagcatgtattggggggatggggcttttatgttttgctttgttttgtttttctgaaaaggccaaatgatatctctttggctagttagaataaaataatactctggaaatacttgtaattacttgacaagaaaagagaagtgtggccttacctgattccctggctggaatgtggctgtgtacctggatatcagtttatgcttcttcatatgaccagaaaacaacaaggttctgatatgtcagagcagctctaacacctattacttaaggggcatgggggcagagggcaggtaaaaacctattgctcaaggccaccttcaaatcacctggcatttgctactgaaacattaaagctgattgaagattccagaaattggaaattgtgagtggtccttctaaaaaagaattatagtgagtcacatgtaaaataatctcacatttaaatcactatgagtcactgggtaagaacaaattgtctgcataatttgcatgtgcattcatagctaagattattttctcacttgaattgtgttcagctaaagagtataatctagtaaataagaatttactgcaagacatggctactttggaggtctacacttattgttgaatttctttttttttttttaaaagtcacatgtgatattaaaatttcaaagtgatttttaacatggtaggaagctgaaaggaaatctgttctgctgccttaggcctctgctagagaaatgggtcacctgtttgaaaacattccaacatcataaacaactgctataaaaaaacaggatctactatgtaaagtgatttacaatagccttgtcatagcaactttatcataccaatggtctatttttaagattacaaattgaaaatatgttgcacaaaacagtttaatggagaaaatcaggtaaatatcaatgtgatgttgcactatctcagtctttatacatcattaagatgattttaaaggttaaaaagtcaaaaggaagtgactaatttgaatatgctactgatttgacaaatcgggattgggggcaggtgtgacataacccagaaacattaactcagaaaggaagaaaactccagagaataataagatgacatttctggataatgactctaattacatccagaatgtacaatcaggtatcattaggtattcctggattatcaaaaaaaaagaatggatttaaattagaaacacagttaccactatgctttgacaccagcaaaaaccattacttacagcttctgaaactgacaagagcaaatgccaatcaaataaatagcctgtatttagataacccaggtaatagttcagtggggatttttggaaaagaaattattatttcaatgccaagtcacgcttacagctttgaacaagtagcaaaacatgggcatgtttctaaaatggatttcccagcatccgctcaaaagccggaggggatggcttagtgttttaagcttcagatttgaaatacctagactccctgcaaactacaatgttaaatcctctgtagaaccacagcttcaaatgctatcaggaaagactcaactctccagcctttagagactgataaattgaaagccatgaagttcagaggaaaaggaggggagtttgcagctgcccacaattaccaccctcaaccttgaacacacacacacacacacacacacacacacacacacaaacacatatgtgctcatgtacactcacacacatatacacatatgtgcacgcacacacacacacacacacacatgttcacaatgcacacatgtacacacacaggtacacagggacagagtgaaacagacagagagaagggggagaaggagagaggagatagagtcagagacagagacagcaatatttgcagcagcttttaaaagaattaatagttatacagaagcaagattcctctagagattttattcttggaatgacatcagcatgcttctcttctgaatccagaaatcttgcagctctggtgttcaccagcttcataaacattaataataactttcagagaactcaaagtgaacagaaactatttccaaatcaaaatttagtgcaaactctgtcactttaaaaagcattctaggtatccagccagctcacggcaatgtctgcattctataccgactgttctctccagacacttatcaatagatatttggtaaatgctaattattatatgaatgttcttctaactcttacctcattcattaaaacaagaaagagtattatctctatttaatagatgagaaacgtctgtctctgtaagattaaataatctagctagagctgtgatgtgttatccaaagttttaacattttggccttgatgcctgagatattgttataagaatgttttccctagtaacacagacattttgaaaaatagaactaagtggtgcgttttaagcttgaataaaaattatcatatagcttttatatcttttaaaatcaatagcaatgtatagctgttacatacaattaattattgaaataagaaatgaggtagatactaagaaaacggcaggccatgttttacaagtttaccatgtattgttaacagatgtccattttaatttagaagtacatcaaaatcaagcaaaaggctgcagttacattaagaagcaatgaaagatcagtattcaccaagtagctaaaaagaattaatagtcatacagaagcaatccaactatccaaagttatctaacgtccataggatgtaggttgtagctgtagcaatttttctaagcatatacaaaatgagtttactgagtaccatagtggctgagtaccacaacagccaccaaagatggtgtatattttgagactgcacattattttcagtacaaatgcccatagaaagtaggcacattgagactttcaaatattcctattacaatatattttatctattttatctttcttacgttttctctctctctctctctctttctctctgtgcatgtgtgtgtgtttgtggtatgagtgtgtgtgagagagggagggacagaaacagacagacagacaaagacacacccagagacacaagcacaaagaaagatagagaatactggctaagttacattccctaatggatacaattacaaggttttaggatttagaaaatcttgccatttaaatcacatttccttcaagctaagagatttgtaaggcctactgtttatacttggagatgagacagggatgctaatattatacagtccgagacagaagcacccagtcttcttgaagtaaacactgatcatgtgttgtttctaacatccttgtttgagctgtccttaggaatatacataatctctgcagactaaaagctttatcagttttgttgaagtttcatgattctcaggcaggaaaggaaaattagatcccaagagggagggtccccatccccccaattttcttcccttaaatttgcctgccttgctatcctacctctgtgtgagtctaggttctttcagctggagaaattatattgcccaaaacgagcttcaggaaccatgactagtttaccatgtattatattttataattcttgaaggcatgtctcggttctttgaacttataaataacaactcaggtgctatggaaaattaattccgaagacaataagtgttttccttgctttcttattccgtttcatccatctttctcatctcacctagcaagagctttatgctcattagcacagcacaaatagtttggtcctcctccaaaaccccatagaaggatcatgtgtcgtttctttttaattacacctaactttttaatagcacttgcctgcctggggatgattctaggatatcttatgctgtttaaattgcagattcagtttccgtgcaatgagaaccttgaagactctctaagcctcacaactctcacctagttcatattttaccagtctggatagatttatagatgctctttaaaattatgccttccttgagctacatggacaagcatcccagagtcccagtgggattactggtccatgctcacacatctgcacagcaactgaattatcaaaatgagcagccggtaccatgcatgtaaagctcccatttctccttttattcaaacatttatttagtacttaatggtgccaggcacaaagataaaataaaataccttcagaaaagactggaattagacttcttggctggaggcaaggaatctgcacttcagtgggcaatgtacagggtacgtttctgtttgcccagcatgtcctttccctgcagctcagggatttgtaactaaaggacgtcctacaaaaacctgtggtgaagaaaggatgtaaaagtctgtgtcgaaaatgcctcaaacagctaggtcctaagcaagagcacttctcctatactctatagtcattttaaaaatttaatgaaagtccagggtagattatagatcgggctggctgtctaccttgaatttgcagttaagatggcaaatgcataaaactcatataatatcttatcagttatctgagttttcaagcatcgtgcgactagggtaacatattttcatattcattttcaataaggtcaatctccctttaaaaaatgggctaagcactaaaagtactagtattatatgtatgtatcttttcacaaagaactaaaaagaggtcgacagaccagaccactaaagaaacagtatcagatttgtaaaaagaaaaaagaaaaaaaggaaaaaaagaaaaaaagaaagaaaaaaaaaaaaaaccttcactgggccaatagaaggcctcgttgtctcgcgagagttgaggaagttggggatgagactaaagggaatcacaagtctgcctgagtctgagctggtcgagacctttctcgcgctggccggctgggcgcgcggccggcggggacttttttcacgctgctcggcgggtcactcagctatggagcggaagtcgaatctgtctctgcttctcctactgctggtcctgggcatgcccctggtgcggggctccagccctctgcccctggtcgtcaacacttggccttttaagaatgccactgaagcaggtggggagcggcagcccggggcgggtggctgcactgtgtgagctcctctgcaggaagctgcactcagtccctaaggttgcaggagggaacccgctgcagaaggccgagcctcctctccttcttcctgcatctctgactttacaccagaccctctccatcttccctgcccctgctgcattttaggatctggtgtattgttctgcttcctgcaccaccttgtctgacctctaacattgggcctcttagctatacttgtacagggtcacctgcctcactttttgtggcagtcttttgccacaaagtttttcctccactctacacttcttgtgatagcctccttcctgtttctccattatcttctggattccagtttaggaaacaattgataatttcctacggatgcatatgtatttgatcaatgtttgtgacgctgcccttatcacttatacattcaaattatcttcagtgtttcttgggattgtaccttattgcccccaaccttgacacccttgagactgctatcacattaaatgttcgtggacactgttggatccagaatccagtgcagaaaaaatctgtatgttatcggggatgtgtgggaagcagagttagtgagaaatcagaccaagaaagagacctcctaacaataaccaaacaaagaaagtccacctttatatgcatggtatgattctgtgaaagttactagtattgaagttggggaggggagacttcttaaaaccaacatccatggaattataagtaaaacgtctttcctttcaatacctacccactcgatactcaaagaacaccacaaaacacaaacaagaaacgtggacaccttagagaaatgcctttttgaaactgggcaacttctgaaatatactgtgtggccttgaatgaattacttcatccatgtctgtgcttttcttctgaaaatgagaattataattataaaatattatctcagaagctgcatgaaggtgagattaattcacccacatgaagtcatttgccgctgtaatactctgctgaggcttgctgggatacttgttctcattgagagtgtgaaatatgcatattttagtaatctaatgagtgacatatgcctgtaatttcagctctcaggtagctgtggtaggaagacccagacttgtagacatgcctagacttgtacatggattttcatttgggcttagggctagatggcaagaccctagctcacaagatgagaaaaacagaaatgaagaaatgttaagctgtaattcaaaatactttaaagttcaactgtctccaaatagtttcagttatctctcttaaagatggcatattttttacacagagaaaaatagttactgataagttttttaaatagtttccactaagagccaacctctttgaattctttatagtaaggagtcatatactttggtctgtatcattctaatttccctgttgtaatgttcccatttggtaaaatgacttgttaaaatttcagcttaacagtataaatgttaagaaaaaaaaaacttagacatctcaaactgttcttggcttgttgcatttcacattgaaaatatatatgactatacataagctctgttggaatttaacagcgtggtggacattgctatctggaggttctgccctggatgcagtggagaacggctgtgctgtgtgtgagaaggagcagtgtgatgggactgtaggctttggaggaagtcctgatgaaggtggcgaaaccaccctggatgccatgataatggatgggtaaggatgcttttcaggacttgtctgtgcgctctcctgtcaggtgggctcatattcagagcaggctggaaggatgcatgaatgtgagcatcagccagaagtcccggcttatggggcttctcccttccaacacaaagagtgaacagaaaaaagaaaagaaaagccgaaaggtcacccggatactcaggatcacagaaaagtaggtggttaagtagctttggctgaggagaaccctgagatgcagagctgtacctgtgccacagttatttgctaccatctgcaaatgctgtggtctcagtgacctcacccagaggcctctgtaaaagccatgtttaaaataatgtgttgggatatatactaaatcgactgttcgttcttgaattttgtctgcgggaatccatgaactttacgggcggttttcccttctgtgttgagatgcagtttagccttccacgtattgctgctccgagaaatgcgattttttatgttcaaataccaacagaaaatgccttcgtaaatcttccacgtccttgccttccagcactgccatggatgtgggagcagtgggaggccttagaagaattaaaaacgcgattggcgtggcgcggagagtcctggagcataccacacacacgcttttagtgggggactcaggtatatgtaaaaccataccgaaattttgttccagtctttttgtctattgtcactgagaaagagagagggagagggaggaagggatgtggggaggaacaaaggaaggaaggagggagggagggaggggggtatttatggagtcagttcaactcttcctagcaaaccttgannnnnnnnnnnnnnnnnnnnggagggaagaaggaaggaaggaaggaaggaaggaaggaaggaaggaaggagggaaggaaggaaggaaggaaggaaggaaggaaggaaggaaggaaggaaggaaggaaggaaggaaggaaataactagcttactgtgatgtagagagcaaaggagacctaagttgaaattcctgctctttcagttcagaaacagtaactggtcacttctgaatcttgctttgtctttaagacaagtgcattgtaagcaatgttatcatctgtccctgcgtgattgctgccaccaaagcagggtttctatcagttcccatccggtgtggcatttctacagatctaagaccggtacagatctaagacccagggggggaggggagactgtttatatgagacagtggtgccagagattgcagtgacagtgtcacttaagtcctttccaggttccatgacagagggttctaatgtagcctatgatagagaaaactatattaatggtatatttatgtagcactcttaataggcttgccatagaattgcagactccctgaaaaggatggcctttggtgtttgaaatccatttgtgtgtcagagagcggtgtgcgctctgaaaggctgtagctgttcaaagtcgaagggaaacattcgaaagtgaagcagtaaaggaaatgtgtacacaaccattggttggtctccagtggttcggtcatgggagatacagagttatacacaatccagaggtctgcaccagatcagtgatgggaaagacacagatacacaacccaaaggtctccagtggagcagtcatgggaatgacacagggaagctgaacatccaaaaacttcccctttaaaactgtttacatacacaaatgcttttgcaagcctgtgtacagccctcctctgatgtctttccatgccccatgcgagtgacagctgacccacagtgcctctaggacatggattctgcttagaaaacaacaaatgcactagcaatattttgctgaaaggacccagatatagctgtctcctgtgagactatgccggggcctagcaaacacagaagtggatgctcacagtcagctattggatgggtcacacggcccccaatggaggagctagagaaattacccaaggagctatagggaactgcaaccctataggtggaacaacaatatgaactaaccagtaacccctggagctcgtgtctctagctgcatatgtatcagaagatggcctagttgtccatcagtggaaagaaaggcccattggtcatgcaaactttatatgtcccagtacaggggaacgccagggccaagaagtgggagtgggtgggtgagggagtgggtgggggagtaggaggggggcttttgtgatagcattggaaatgtaaatgaaataaatacctaagaaaaaaaaaaagaaaacaacgcatgggcttacactttcctctttcttctccagccaccaagtttgctgaaagtatggggtttactaatgaggacttgtctaccaaaacctcaagagatcttcattcagattggctttctcgaaattgccagccaaattattggagagtatgtatgcaaattcaactataaaaagtcaactttaagtgatccctttgaccctcttttgcctgtgttgatgaatgccctggtcacatgttagaatcagtggtatacgttgactctgggtatgcccatttttcaggaatccctctcaggttaataactcttgctctctggcagtaatatgtaaattcaaggtttgctaggaagagttgaactgactccatcaacactgttttacttggattttcttggaagaaaatccgccgtctagaatatttcttagatgttatctatgtgaaatatatctaatatgttgcccatgctttggctagaagatttacagttcaggatctagtttgtcactaatgagaccattttgtcttgagtaggaattttagcataaatcagtttggctttgccacacttccatcgattatcttagcctctaatctctttctccctttaatcctacttaccagggcttagttcagtcttcaaaaaccaactggctgtaaacgctgtacacagtcttacgaggtatgagtagaatgagcatccctaaaggaaaagtctgaaattcaaaatgcttccagcaccaacttgatgtcacaggagtgcaaggccttgctactttatgcagtacattgcagtcaaaggacaaatgccactaaaagcctgtatagctgtctccagagtaattatagagacaaactgaaaacatgggtgaattgtgtgcttacacttggacccatctgtgagctatctcattatacacatgtaaaaaatggcttaatagccaaagtattccaaaaaggggtgctcagcttgtattaagtttttgtcttggcctggtggtggcaatggtggcgcactcctttaatcccagcatctgggaggcagaggcaggcagatctctgagtttcagtccagactggtctacagagctagttccaggacagccaggtctacatagagaaacttcacctcatctcaaaaaattaagaaatgaacaaattcctatcttaataccaatccatccaaacaacctaaatgtattggtatattcctatacttttaatatttagcagagtcttatactgccacctagaaaggctgcggccggaggggtccagctcatggcccacgggctccaggaagctgagatcagtggtgtccaacacaaacttacacagtgacttagaacctgacgctctgtgcagtgccctgttgtttgattttaacttgagtgagcagttcgcaagtataaaggttgcagctgacaatgccatgtctctgtgtccaagttggatactttatgaaccataattaaaagtaagcttgctttcaaacagattttacttgaaatctcacaatttgtctcctgcgaaccatattctgacaggtcaggctgggtcttcctttgagatgaacatagaatttctagaaacgttatacccgccattgttctgaggctgtacctatgtaaaggcagcatccagcagtgtagtgtttgcacctgctgttctgatccacaacgtgtaatttgagaaccatctattgtcacataagattaagctaacttttgagttctgagttactgatgtctttctggtttcttctagtggttagcagtcatacacaattatttgcccatttctaaaacaccctttttaaccaaacatctggaatcttgtttacagaatgttattccagatccctcaaaatactgtggaccctacaaaccatctggtttcttaaagcagagtatttctccccacaaagaagaagtggatatccacagccatgatactattggtaagtcacttgttctgcagtgttattgattattttacttgatgaccttccacagctcttagtcatttttcctcatgtgccaggagttagtctgctttcgttattttaactgccaagtaaataccacattgatatgtgtgtcttgctctcactatatgtacatgcacatatatacatatataacaaaccttaaaaataaattcatatatgtggtatgtatatatatatatgtataatcttagcatctgaatacagatttgtaattacacaaaacatcaaatatccagtgactattaaaatattgattatcaaatcattaatatttaatgctttggtaattttatgtaatttgctatataaaataatctctaatcatttttctaagcagtaatgttgacagtttctcttaatcaaaatgaatgattttattggaaattgcccttgaaaacatactgaaagtaactggtagatttgaatattaagaatataaggaaataaaaaagaatgtgagagggtttttttcttttttttggattttgggttttcgtccaataatactatgaaatcaggtcattaatatttataatattataccactgatacagtttttagtcttcttactttttcctgttcttctacatataattaataagagaacatactttgttttcttaatggagtcagtatgtaaaagctcactaccatagactagatgatttataaacaacagaaatttatttctcacagttttagatgtggaaaattccaagatgcagacagtggcagattcattgcctgttgcagtcccattttctggctcattggtggtgcgtctagtttttttattaatcccactaattagggcattgcccctagtaaccatccacctgctacagttccctctaaatccattactttatggagatataactctgaggggacacaaaccctcacacagtagcagtcctcaaccgattcattgtgtggatatatttaagggatattctgggtactcacattgtttttgttttgttttcttatccctaggcatggttgtaatccataagacgggacatactgctgctggcacatccacaaatggtataaaattcaaaatacctgggttagtgtttccccaagaacagatttctcaaatatgtatcaaatgtaaaacagtgcatgccaacgcttgtgcagggcgccaaggataaaatgaaatcctaacctcacagataaatgtggaagaaaacatcaaagcatcacagccgaaaacgccagagtttagaaatgttaggggttaatctgtgtcacctgtgtagttagtaatgctggtaaagtaataaattgagactgggacctgactacacaggatcgaagggggacatgcagcatgcagccagcggtcctcgtgtatacaagtagtccatattccaggctgatggagtggtggctggaagaaaagctggagtgtggtgtgtgtgtgtgtgcgtgtgtgtgtgtgtgtgcgtgtgtgagtgagtgcgcgcatgcacacgaatgtgtgcacactcatgtgacagagattacagaatagcaataccttgggatagtcgtggagattaagaggaatgcaagccagatatgcttgagacattgtaggtctcttttgttcttgctttgttcttaagtagaggaaaggaattaagtaggcttattaacagaggaaactggtataagtcgggcacgttgcataggaagccgtgtaaggaaatagagctttccaggaacaccagagattgagaaatgtgtaagcagagaggagtcgctgtaaatctctgtgagctgacacaatgaactgacgacagtgtttgctaaaaattttaattgctaagaacaagtatttatggagtataacatgatactatcatacataaaaacacatgtgaaatagttaaaccaagctatttagcttatgcattgtctcatgtgctttttaaaatctctcctcttgcaggttttccatccatatgtactattattaaatgtagtttcatgcaggtctctagaactcatatttcgggttttaagtaatttctttttttctgtcagccaccctctctccactctcagaaaagcggtgttttcatcagtttctaagaattcagttttgttacagtgaaaatctgcctgaaaacaaagtcataaattagcattgctctttgaaaaccttaattgaaaaacaaacagaaaatgaattctggtgaagcactgacttaaaacagtagccagcggctgggcaggaacagcccccagttatgaaacagtttacaacatgatttagttacatctggtttcctgtcctaaatttttacattgtctgttcacaaagtcgtgtaggggattcaccaatccctggagccggagcctatgctgatgacacggctggagcagctgcagccactggcgatggtgacacactcctgcgctttctgccgaggtgagacttgttacctttgtaaatccccaaagtccttggaagagacagcaatgccaggacaggtaggatttctgtagtgtgttgtctgacttcatgtgcaagagagattttcatgaagctgggggcaggtattttttgttgttggttttgtttatttatttttgatttttgtggttgttgtttggtttgctttactgttgccagttggcttgtgatccttcgcttgtgtcatctttaccctgtggtgtgaaatgtgtctcaccttgtctcaggagaatgcttatgatctgtttaaggagacaaggccacagtgagatgactgcgaagagtagagtgagccactgtgtgcagctaataactacatgtgtgccatttgaacacagacagtgattatagcttttccttatgcaaatataaccactatttgtgatttttggctgttattactaaagtgacagtttctcagccaaagccaaaaataatatagtcttcatctgaaaataatggtggataacttgaatagacaggggttgactgccttggtaataaggctggataggaattactgacttgtattcactcataggtattatgctcggtgtaaaaatatggttgtttctgattttctgatgtcaacctagccaaatgtggagttagtgtttattctgtactctaatattaagctgtctcctctgtttatattagctaccaagctgtagaatatatgagaggaggagatgacccagccatagcttgccaaaaagtgattttaagaattcagaaatactatccaaacttctttggagcggtcatatgtgccagtgtgaacggaagttatggtaagttagatgtgtttttatttgagtgaatttacaagtgaccttaaaagatgcacgcctctatccaagcacgctctacactatattctgtgtacaaagtgagtgtgtaaaggttaggcagcttctgagtgcatggcaggggctaatctgtcagttccagtgtagcactgaactatagacctaaagtgactgctgagagtcacggtctactattctgctgcagttcttatcttttgcatctgtcctaaaagtttagtttgggctggagggctttttgatagtcgaatttaatcaaaagctttcactggttagagatagtggggctaaattaatctcccttacttctctctcatgcattaaaacatctcggtcatgtcagtcttcttggtgctctgaagaacagacccttgctggagagtcagccagatgggcccgcagaattgatctgacaccgcttgtgccatgtcttctgtttgcttcctcatgagccaagcccagccgcaaagtgtagaaggtcaggcactgtggcttcccatctcggagtcttcagatggagaatatgcagagcctactgatcaatagagcttattaggctagactgctcgctgctcttctttgatcttttacttcccacacttttgtatttggagagcttgtttgaagaaagcctaattcttttttaagttctaagacataaaagtcaaacaaagttatgggggggggggttgctttatgtatcaaagaaggcactttaatgattccctcttaacagataagccacagaaggctcaaatttacatttagcagggtgggaagatactaattatctaactatatgaattaaaagttgactacgtctaataaagtcgtgacaggaagacctctccccctgcaggtatgaagagaaactgaactcagacagaaagcaacttgaccaatagctcttcccgcttttcccatccccgtgaacaggggtgggaagagggggaggaagcagtgatgtgggaaggttttctagggaagagaacattgtagtagctaggaaaatacaaaatttgacctttttttttttcctaaggaagggattgaaagagcaaaataatagcagtgagagcaagtgcatgggggcaggcattggctctttgatgttcaaggggatcaattaggtctggagaaatggctcagaagttaagagcacttgctctctttttttccattaattggttaatttattaacactgcatcctgatcgaagctacccctgcctcctctcctcccagtccctccctctcacttcttcccccaccccctcattttctcccatggggatcaacctgccttggcatacatatcaagcggcagtaggcctagctgcatcttcttctattgaggctagacaaggcagcccagttagggaaagggattcaaaggcaggcaacaatgttctagacagcccctactcctgctgttatggatcccatatgaagaacaaataacacatttgtgtgtgtgtgtgtgtgtgtgtgtgtgtgtgtgtgtgtgtgtgtatataggaggtagggactaggtctgtcccactcatggagagcacttgttcttgtataggacctacacacgcacattaggttcccagtacccacaaagtatctcacaaccatctgtactccagtttcagagtgtctgcctccttctaacctctttgataccatgcacacatgagatatacatacatatatgcagacgagcacttagtcacataaaataacttttaaaaagctataattactttatcctcctcttcttccatgatttttcattactctctaccatgaagacaggaagggcaaaatatatacacacatacacacacaaaaatatatatatacacagtgccatatgcctcaacaatatctatgccaatgttatcgttattggttctgaatacatgcctcctataacccatgtctgtctcttttgtctcaaggtgctgcttgcaacaaacttccaacatttacacaatttagtttcatggtttctaattctttacacaatgagccaaccgaaaaaaaagtagactgcatctaatctattctgtttgtcaacgtgtgtatttgaagaaggaaagtcatgaaggtttggaaagttgcttactgacattatggaatgtcttcatttattttaagttcttgtgtaaattaagtaaaaaaaaaataaattatgctctaatgttatttctttgtctacttccttatttatttttatttaagtcagtttaccacttgagaatgaatatgcatacatatatgatgtatatttttaaacttaaagtgatatttggatttctgatcaatgccacgagaaacttctactctggggttttatttttataatgccatagaaaataaagtatctgtaccagaggactcagaggacagaagctggccaggtcccctagaagcaggaccattatcgcagcagagtaaacctaacttaatttcagaagttccagtggtatgtctcttaccaccatagccttatcattagctttgaccggattctctgtaagacctcaaagcaggaatgatggtattaaaatctatacagtttgaaaagctgaggagtgttgagttgtttttctttggatttctctttgagggagcactgagtaggtgaatatggttgatacacagaaatctctgatctttgtacaaccaatactcaatgttgatcattactcttgaaaatcatttagggctgcagttagaaaatatcaatgagtgtgctatctaggttggcattatttcccaaattcgcctatcacctacccatgcctgacaagtacaaagatgctgtatgtctgatttctcaacattatcacttcattcaaaatcaccattgcattaatccacaactgtggattagttgaatgcattatattgttgtcaaaccttaatatgtacaacgtgtgggactgcgctaccggacaggcataagaaatggtaaaggaagcacagaattgggaagagcaggagtgggaaaaccttccctacctgcctctacctgctccggaacacagatctgtgaagccacactgaggaccatggacacttgatcacttaacataacagctggggttcttctccatgctattgaggtatctagatggccctgagctttcagccaatgagttcccctttctcagcattccttcccacaaaaaaaccattttatccatgattcacccaaaataaagtgtatgtgtttacatccatgatcaaataaaccagtatgaacaagcaaggatcatcacaaagagttccttccttatggaccgttgtggagaaggccttcctcttaaagagccacgcctaaaactcctgaggaaggccttctcttttccattccctctagtatacaaggccctgccccattcagaccacattccgggttttctgcttgttcttggctccgcctggtgtgcagatgcccaaggggaaggtagactggtggaacacattgtcaaccccacccctgttcatgactctcagtggtacacagaccccacgatttacccttctggtccagcagtagggaagacggactgcggacctctgattctgacttcattcttcctcctgagcagctgcatgatggaggtgctccaggcacccctgcggagaagcacaacatggtatagcattagtactgtatacacaacttgctatttatttactgtaagttccctgttgagaataacccatgtagttgttctctagccatcctaccatttttgggaagccgtttttaagtatgctctactggctcagtatgctggacttaaatttgaacccagtttaataccaatgcttcaattacctgagataccaagtaattttagcccacattaataataatacttttataaaggacatgttcagtgccagcagagagaaatacctagattattttcccagaggatttaggaggtgaactgtatactcaagtgctttctttgttttgttttattttgcttttcttttgtttttttaaccacagactcataaaaattttgataatttcaagtcttcatttatttatattgacccattgagatagtcctgtcataattttttttaagcatgacaataccttgcttgatgctctcaatgacctgcatccttgagtagctataatgaacagacatccgtgacagtacccagtggacacagattatgatccagtataaactgccctgagtaatgcataaaatatgtcagttgaggagttctgtggatattactaaaataataagagtatttaaatccttaaaaggaaaggtttttcctgataggcaaaggtatactagaagatgctgatagaaaattgattttaaaatgtttaaagtattgggacacttgcagataacaatttcctaaggcatctttcataatttgtaaaagtagcccatatgcctgtattcagtggtccctgatagtctggaaaaggcaaaacattcggaccttcatggtactgccatatattcaggaatgtgtgctcaagggtgtttctgtagcaaaagctgtacaactcctgagaaagggtgtatttgtttgctctctactctcagaatgtatctctgtaaaggaaatggcaggtgggtttgtctgcagcttctaataaaagattacaattttctaagactgtttgctctttgtgtataatggtgacttgccttgtgggaattgttctgaaatcagcagtctgactgcaatgagaggaaagggagatctcactggtggaccaaagccaggttagttcccaaaggcctccattccagagcctatactcaacaaatataaggcagggtgggcaagtaacccctttgtctttgacatgtctttcatattttctgtcagtttctatgacagtatgatagtttgatatgtttgtgtgtgagattgtgagttttgactaatttaatttaggttgaaaagaaccaggagataatgaaaataactcttatttatgaaaactattgtggtggtttcaatacgaatggcccccatagactcatgtgattgaatgtttggataacagggaatggctctattagggggatggcattgttggagtacgtgtggtcttgtttgatgaattgtgtcaatgggaggattggctttgagatctcctatgctgaagctccacctagtgtggaatttcagtctcttggcagcctgctgaaggcagtctcctagctggctacattaagatgtaggactcttggctcctccagcaccatgtctgcctgcatgctgccatgcttcctgctatgaaacctctgaaattctaagccagccccaattaaatgtttgcttgtataagagttgctttggtcatggtgactcttcacagcaataaaaccctaagacacccatctacaatatcaaaattgtaatcaaataaaatattcatgtagtgacttgtagaattcaagctttaatatgtgacacagaatgctttatactaaatattaagtgtttcacataattaacattttctcccttttcaaaatagtcttaaaagagcttgacttactgtattgattttaactagaaatatgcatgttataggtacaaaaacatcaaaatatctgtttccagtatcaacactcagatgatttcttttgacttcagaggtacaatgtattttagttgatattttgttcctagtcaatatactttcaaagcctataattttatattgttgagtatctttttacatgtcatgagttctgatattgagtgattgaatttagacctcaggacccaattaagctcatttagtatctttattgtacaattaagattcatttgaatgatatttgtaggtgacatacacgtcaattggatagcacttctgaaaataaaattagtgcattcatgtcattgtcctggtgaagttttggttaagtttccaggattttgtataaactctaagtggcttgttttctttagtgttaaacttgtcacttatcacacagtaggttttcaactattttacacaattaaaagatgaggtgacaagatcaccgaaagtaccaactgctatgattaagtgccaagtgacatgtattttcctatataaccaagggtcagccagttttttaaaagtcatattttagtcctgagaaagtcacatctacttaaaggataaaaaatgaccacattcaggatggatataatggaagtaggagctgctgtgttcaacctatttgcctctgagttaaagggaagtaagttatttatggtttcaatgcatggatactgcattaggaattggtcatttcatttaaacttgtgacctttctgagtggcgcattagatgtgtctgctcatttgttttctctaattaaaaatcttatttctatagtgtaagtggtgacatacaatattttttaagaaaaccagatcttagaacaaatcttggagaacaaaatcccttctaattgcttgtaatccatctcatttctttctgactcgtgcaaaacccttgagcaccataaatgtcataatacttctttccattcctaaataaaaaccagtattattcatcctttcttgttctgctcattgtaattaaggctggttgaaaataaaaccaaagttctagtaaaataaatatcagacggctcaaattaacttcatttcactcaatgaggctgaatcagtttagtacatggtggccatatatacattgtatatatcagcaaacactaaattagagtttattttccctctaaagagacaggtttaagataatgctgcatattagacatgaacacgcacacacactgtcttcaaggaactccagaatgtaattgcttgaattcaaaccttgttctctatcagtgattaactatatgaagttgacaattagcttcatttaattgtgtctcaattttctataccgtgggaataaagataatacacctaatattagtgttcctactttccaaattcatctgaggagcttggtgcacaagggatgtgattagtgcccttatataaacaacatcccctaccttccttcaacaaaccaaggacatatggaatgcagtctttgaagcacagaaaaccttcctcagacacagaatagattgtgtagaagtccaatgtttaaaatacttgagtaaccatccttcaccagtcatttcaacaccttaatggtctcttttaatacaaagagaccagaaaaggaaatcaacagtgcagagatgagatgtaagggaaaaacaactggcttgctttcaaatgccaggcacaattatgtagaaaatctaaaagaatcaatacaacatctcccagaaccacaacttgccataacccaatggtggcattcaagaatgccctgtgcacattttctcccatttggctccatctgggccaccagcctgtacatatcactcaaacacaaagtgtcccttctaccttagttaatccttttaagctccagagttttcacacttcaaccaagctggtgtccaaactacacctaaactaccactggctccaaaggtttttcttctcaatgtgaaattcattttgttttcagtcctcacaattctgacagttctcataacaacaaaaattcaagtccaaagtttcctccggaacttaaggcaaactcttaaccataaccccctataaaattagtcacaaggctacctacctagatgtgttcagctggtaaagatcctaactaccaagcctgacccctgagttcagtctccagaacctacgtgatagaattagagaaaagagtctgacatgtcctctggattcacccacacatcacactacacatgagcactatctccaactcaaaagtaattgacgtagaagaactaattcaaatgtatgcccatctagcttacaaataaatgaaactcagactatggttattttatttggatttgacagttactgtggggtaacccctaatctacttttgtaactgcttttgtatctgctgacctagctacttccccagtggtgtaccccacatacttgctatttctcctggccacgtgttcatgttccaccttctctcatggtggtatcctcctctctcctgctaccccaaccaggtaactcaagccctgcctacctctaactggctatgccattttttttaaccaatagttttacattaaggaagaaggtttactcaacaaaagcttgtaaatttgagaattcactcataggcaactagaccttctttaggaacagagtttagcattacggtatgtagcaacagaccaagcctcaacaaattgattcattaattaaagtatgggcatatattcccaatacaaaagggaagaataggagagaagcattgaaggaccagagcggactgaaactcagcaggaaagatgttaagctcttctgtctccttgagaagcatctaaaaatgctgggatatcctgcaagtctcagaggccttacttcaccattatggccttgcctttgtatcccacaggatcacatgctagggctggctttgctcactgcactgaatcacttatactgtaagtaacccttccccgtattcctgtaagtaaccccagtaaaactcattggttaaaactggactatgtctgtgtccatatttggcttttcttcagtttcctatctccccgagagagtgtcacacagtactccactaggacaaattacttttcaattcagcatcactccaaatttcagagcttaggaaatttgtaaaaaaaattctttgacagcatggtaacaggaacactcaagagtcctcatttctatttgaaacttcatgaccgtagcctttactgtccacatccctttcagcatcctgctcttctgcatcctgaacagaatcacccactatgctgtacttgtagtgttctaggctttctcttgcatgcttcttttttcacactctactacattcttcctgcaaccacctccaagacctgagagccacgggtttaattacaacagcgaccccacttctctggtatcagttttctgtacgaattacttcttgtgtcactatgaccgagatacctgagaaaacaacttaagagggattatttattgtggtttacagtgtcagaaggtgattctgtcatggaagggtcagtacagcaaagaagcttacattgttgtagaccagaatcacacagggaatacaagaatagatcaggaaatcacaactcccaagcagacaaaacttaactcactcctccatctgggtttcaattgctactttcctttcttaataccaataaaggtctcgttgcagtcataagtcagtttctcctgatccagttgtctttacaaatgctttcacaaacatcttcaaatgtcctctcctaatcacctcattatttaccaatccaatcaagttggcaatcagaattaaccatcacaatgtgaaataaataatagagggaggattgatttgcttgcctcacaagatcagtttctagccaccataacaagaggagtaacacagattacctcacacgatgatggcaagcaaaatatgagagaatgcctgtactagctgactttctccatatttttctattttcctccagctaggctccctgtctgtgggatcagactgcccagattcaaggtaggttttagtggttacccaatactctcataaggaaatgtgatttgttctcatgttgatgccaaagcaggcatagccaataaataacagaagagtgaagaaatattatggattatgagaacatgagcaagattttctaagcaatgctctcttgagtagaagtgtgacgattctatttgagaatattttaggggcacacatgttccagaacctgctcagctaaggagttcatttctaaccatgcttaatttgaaatagatcaagaataaaagatggtggatgaaatttggggcgcgctgacttctagctcatgtaacacatgttcaaaaggttcagttggcaaacaggaacactttgggggatactcagcttaagctgtgaagttgtagcttagaaacacaaggacacattgagcgtgtgttgatgtaggagtgtgtgcctaaaagttatggccacacctatgcacaaactcactgaaatcctttcgaccacagacacatccacagatgtgctttgccaaactcttaggcacttcctgatcgagccgagttgccagtgaacaattcctactcatcacaactacttcaaatggcattcaaaacaatgatataattacttacagatgtaacagaaatacaaacaaggtaagtgtgaggaaaattgtaaaactcctatgaaggagaaaaaagtacacataaatagtgagattgtacatgttcataggaagtcccaattatgtcaacaggatacttctaaacttattctgcagattcaaaacaatcctattcaaatttccaatacatgtattaacaagctaattctacagtttatagtgaaagggaaaagactaaacagaactaattactaagaaataaaacagagaattggatccacttaatttcaagactcaaagccatagtaatcagcatattgaagcactagtgaaaactaagaagcagatcactgaaacgggttccaagaacagaaacagacccacttaataaaacaactgatcactgagccaagagcaaaggtaataaaatgaagaaaattgccttcttatcatatatatatatatatatatatatatatatatatatatatatatatatatatatcatatatatatacatatatatatatatatataaaacagaaccaagacagaaaacttctaagcatcacaaaagtcagtcaaaatttatcacatgtttaaatgtaaatttaaaactataaagaagagataatgtagaaaatctagagggatttggacttggcaatccattttatatgtaaagatgatagcaagatccatgaaataattgttcatgaaagatactagccagagactgggagtgaggcacagattagacaacaaaatttgcatttcttataatgaacttttttcaatacatggaaaactcttaaaacagagaacaataaagttttaaaatggtttaataactaaaatctacaggggtgatggtttgactagggatggtctccatagactcatgtgtttgaatgcttggctaatagggagttgcactcttaggacatgtggccttttggagtaggtgtggccttgttggaggtagtacatcactgtggaggtgggctttgaggtttcatatatgttcagtgtggtgcacaatctccttctgctgcctgctgaactcatacctccttcttcagcactgtgtctgcctacatgctgccatgttcccaccatgaggagcatggaattaacgtctgaaactctaagccaggtccaattaaatgtgtgtgtgtgtgtgtgtgtgtgtgtgtgtgtgtgtgtgtgtgtgtgtgtgtgtgtgtgtgtgtgtgttttaaataagagttgccctgggcatgttgtctcttcagatcaatgaaacctaagacaacaggtgacaaggtagcacatggaaagatgcaccacagtgcaatgaggtactgccacacaccgataatgtcaaatacacatgaggttgcagagcaagaaaaaaaataaatcattctttattaggaagaatgcgggatgacatagaaaatggaaaagaacttggatggacctttcttttttttaattctttttttttaatattttttattactatgtattttcctcaattacatttagaatgctatcccaaaagtctcccataccctcctccccacttccctacacacccattcccattttttggccctggcattcccctgtcctggggcatataaagtttgcatgtccattgggcctctctttccagtgatggccgattaggccatcttttgatacatatgcagctagagtcaagagctccgggatactggttagttcataatgttgttgcatctacagggttgcagatctctttagctccttggatacgttctctaactcctccattgggggccctgtgctccatccaatagctgactgtgagcatccacttatgtgtttgctaggccctggcctagtctcacaagagacagctatatcagggtcctttcagtcaacgcttgctaatgtatgcaatggtgtc

SEQ ID NO: 1033 - DNA, 1286 bp, Mus musculus
tctgcctgagtctgagctggtcgagacctttctcgcgctggccggctgggcgcgcggccggcggggacttttttcacgctgctcggcgggtcactcagctatggagcggaagtcgaatctgtctctgcttctcctactgctggtcctgggcatgcccctggtgcggggctccagccctctgcccctggtcgtcaacacttggccttttaagaatgccactgaagcagcgtggtggacattgctatctggaggttctgccctggatgcagtggagaacggctgtgctgtgtgtgagaaggagcagtgtgatgggactgtaggctttggaggaagtcctgatgaaggtggcgaaaccaccctggatgccatgataatggatggcactgccatggatgtgggagcagtgggaggccttagaagaattaaaaacgcgattggcgtggcgcggagagtcctggagcataccacacacacgcttttagtgggggactcagccaccaagtttgctgaaagtatggggtttactaatgaggacttgtctaccaaaacctcaagagatcttcattcagattggctttctcgaaattgccagccaaattattggagaaatgttattccagatccctcaaaatactgtggaccctacaaaccatctggtttcttaaagcagagtatttctccccacaaagaagaagtggatatccacagccatgatactattggcatggttgtaatccataagacgggacatactgctgctggcacatccacaaatggtataaaattcaaaatacctggtcgtgtaggggattcaccaatccctggagccggagcctatgctgatgacacggctggagcagctgcagccactggcgatggtgacacactcctgcgctttctgccgagctaccaagctgtagaatatatgagaggaggagatgacccagccatagcttgccaaaaagtgattttaagaattcagaaatactatccaaacttctttggagcggtcatatgtgccagtgtgaacggaagttatggtgctgcttgcaacaaacttccaacatttacacaatttagtttcatggtttctaattctttacacaatgagccaaccgaaaaaaaagtagactgcatctaatctattctgtttgtcaacgtgtgtatttgaagaaggaaagtcatgaaggtttggaaagttgcttactgacattatggaatgtcttcatttattttaagttcttgtgtaaattaagtaaaaaaaaaataaattatgctctaatgtt

SEQ ID NO: 1034 - protein, 346 aa, Mus musculus
MERKSNLSLLLLLLVLGMPLVRGSSPLPLVVNTWPFKNATEAAWWTLLSGGSALDAVENGCAVCEKEQCDGTVGFGGSPDEGGETTLDAMIMDGTAMDVGAVGGLRRIKNAIGVARRVLEHTTHTLLVGDSATKFAESMGFTNEDLSTKTSRDLHSDWLSRNCQPNYWRNVIPDPSKYCGPYKPSGFLKQSISPHKEEVDIHSHDTIGMVVIHKTGHTAAGTSTNGIKFKIPGRVGDSPIPGAGAYADDTAGAAAATGDGDTLLRFLPSYQAVEYMRGGDDPAIACQKVILRIQKYYPNFFGAVICASVNGSYGAACNKLPTFTQFSFMVSNSLHNEPTEKKVDCI

SEQ ID NO: 1035 - DNA, 31711 bp, Homo sapiens
gttttttgaaacatagtctcgttctattgcctacactggagtgcagtggcctgatctgagctcacggcaacctctgacacatggcagccaataaatacttttgaaaagaaaagggagaggagaggagaggaaaggagaggcggggagaggaggggtggggaggggagaggctgaagcaattctcctgcttcagcctcctgagtagctgtgattactggcatgcaccaccatacccagctaattttttgtatttttagaagacacgggtttcgccatgttggccatgctggtctcgaactcctggcctcaagtgatctgcctggtctggcctcacaaagtgctgggattacaggcgtgagccactgctcccggccccactgtatactatgttgatccggaagcgaaatccagatccttcaaaattttttgaaaaaaagaaagcaatattgttgagtactggagacttcattgaaaaggccaggtggcatcgttctgatgatgagaataaagcagtattctactgggagtgtctgagaaggcttttgctttctggatgaaaagggaaagatgtggctgataccaggtccttgtccttttccccagcttgaatgtggatgtatgtctggagcaacagtagctgtcttgtgaaaacaaagcagcaagtaagttctcacagtttagagctactgaaccaatgccagcaactttcttattaggtgcaaaaaagtaaagccttgtcgctttaaatcaccattaagttttctgttatttgcaaccgaaagcacttaaagctaatacaaaattgcagagttaccatgatcataactctaaacctatgaaattcaaggggtttaatgatttatgagttgggtgcggtggtacatacctgttagtcgcagctgaggcaggaggatcgcttgagtccaggagttccaggctgcagtgagctatcattgtacctttgaatagccactgcacccagcctgggaaacacagcgagacctggcattaaaaaaaaacatttttaagctgtgcctttattctaagggccatccagtaataagggaacctaaactactgagtgtcctcagagctctgggtgcaattaaaagttagtggtttcacagctacccaattctgtggttagtagaaaattataaagatgataggaggatcaaaaagcctcttccacagaagctacattagctgggtgtggtggcccatgcctgggattccagctgctcaggagggtgaggtggaagggttgcttgaacccaagaggcagaggatgcactgccaatcctctcaatcttgagccaagattggaccactgcattccagcctgggcaacagagcaagacactgtctcaagcccctctgatatgaggggcttcctcatatcagagttcttatgataccattctctcaaaccacctgactccctgaatttgtcctgaatttggagaactgcttaatctctaaatctgccctcttgagaaaccttagtgttagtaacagacagcgctaactctgctttgtcagagtcctgaattcctaatactgaccttcactcatgatctagcgtgatgctattttaattgctactgactatcatataaactcaacatagtatctgacagattaattctgaaaaaattcttcgtatacaaagccaaaaatttttacagcaacagaaatcaatggttaagtaatttctgtgcatcataaatagattttatacatcctttaaaattacattgtatctgcacatggaattttttttcagagacaaggtctcactgtgttgccccaggctggagggccgtggtgcaaacagctcattctagttttgaaacactgagcttgagcaatcctcctgcctcagccttccatttaatagctgggactacaggcagcagttgccaccacaaagttaacttaaaaaaatttttttttagaaacagagtctagctgcattgctcaggctggtctctaactcctggcctcaagcaatcctcatgcctcagccttcccagtaactaggattacagacatgcaccaccacacccaggtgcacatggatgtttacagcagctttattcataattcccaaaacttggaagcagccaagatgtccttcagtaggagaatgaataaactgtgatacatccagacaatggaatattattcagcgcttaaataaaatgagctatcaagccatgaaaagacatggaggaaccttaaatgcgtattacaaagtgaaagaagccaatctaaaaaagtctccatactgcacaattccaactaaatgaccttccagaaaaggcaaaaaccatggagacagtaaaaaggtcagttggttgccatgagttagaggggagggagggatgaatagatggagtagaggattcttgcaatactctaatggaatatatgccagtatacatttgtcaaacccacagaatgtataataccaagtgtgaaccttaatatgaattatggatgtggaatgataatgatgtgtacaatttgttcatcaactgtaacaaatgtgccatgaggtcacgagatcaagaccaccgctaacgcagtgaaaccctgtctctactaaaaatacaaaaaattagctgggcctggtggtgggtgcctgtagtcccagctactcgggcggctgaggcaggaggatggcgtgaacccaggaggcggagcttgcagtgagccgagatggcgccactgcactccagcctgggcaacacagcaagattccgtctcaaaaaaaaaaaaatatgaactatggatgtggaatgataatgatgtgtagaatttgttcatcaagtgtaacaaatgtgccactctggtgggaaggctatcatgtgtgggggcaggggtatattttgtactttctgctcaattttgctgtgaaccaaaaattgttcttaagaaataaagtcttcaacttaaatgtaagacctgaaactataaaaattctagaataaaatcataaaatctaggaaaaactcttttggacattggtctaggcaaagaacttatcactaggtcctcaaaaggaaatgtgacaaaaccaaaaatagactaatgggacttcattaaacctaaaggcttctgcacagcaaaagaagtaatcaacagagtaaacacacaaccttcagaatgggagaaaatatttggaaacaatgcatctggcaaaggactaatatccagaatttaggaagaaatcaaacaatacaatgacaaaaacaacaaataaccccattaaagagtaggcaaagacatgaacacatatttttcaaaagaagacatacaagtggcaaacaaccatatgaaaaaaatgttcagcatcagtaatcatcagaaaaatgcaatttaaaaccacaatgagataccatctcataccagtcagaatggctattactaaaaaagcaagaaacagcagatgttggcaaggatgtgtagaaaaagaaacacttatacacagttggtgggaatgtaaattagtataatctctatggaaaacagcatggagatttctcaaagaactaaaaatagatctacccttcgatccagcaatcccactactgggtatctaaccaaagggaaagaaagcattttatcaaaaagacacctgcactcaaatgtttatcacaacactattcacaatagcaaagtcatggaatcaacctaaatgtccatcagcaaacaactggattaaaaatgtgatatatgtatatatacacacacacaccatggaatactactcatccataaaaatgaatgaaatcatgtcgtttgcagcaatgttaatggaaccgaaggccattatccttagtgaaataactcagaaacagaaagtaaaaaactggatgttttcattcgtaagtgggagctaaacaatgagtacacacagacatttagagtggaataacagaagactccaaaaggtaggagggaaggagggggtgaggaatgaaatactaccttttgggtgcaatgtatcctgtttgggtgatgggtacactaaaagcccagacgtcaccgttactcaatatatacatataacacaactacacttataccccgtatctataaaaataaaaaattaaataaaatttttttaaatcttcagagaacatgttatagaggtccttagcggttttctggggtactgacaatattctgtttgtttatataagtggtgattacatagctgttcattttctacaaaattatttaatctatttatttacattttatgtcctttactgtatttacattgcacaatgaaggtttttaaaaagcataaattttaatgatatgcagaggtcaaagagatattaaataaaaaagcaggttctacaacagtgtgtataataccaagatttttcaccaaacagatacatatcaaaatgttaagaggctggtgattttcaacaagagctagagtatttcagagatatttgaaggacacaaaagtgtttctaaaaaatgaaaaaaataagctatgttatgtgaaaatctttcctttcatatttttatatgaatgattgagaattaacagactatttgtgtagctacacacaggatacatgtgttcattatttggatagttttctaatactcattgtcatgatcgacaagtagatatcattttaaatgcataatgtacttcctgtaagtcactgttagtttagaagtttgcttttattgttgaatttctttattgaaatcatctgtcacactaccttaacaatgtcaaagtcattttttaagtggtaggaagacatcctgacatctactctgttgccctaaggctttactattgtaatggatcacatttatgatgacatcataatgttataaacaactgtcacaaaaagcaagatccaccatgtttaatagtctactatgtccttgttatgaaaactatatcacagcagtggcccagtattacaattacacattgaaaatatgttgtacataatttattttgataagaaataacttaataggcccacattctactgcacaatcttggtctttataagtcactaagatgacttttaaaggttaaaaagtcaaaaaagtttgtgattagaatctgctattgatttgacaaatggttttgggggcatgacccagaaaaattatttcagaagagaagaatgctctcttttctcatttagagaataagaggatgacacttatttctgtataatgactctaattacatccagaatgtacaatcaggtagtaacatcaaatgttcccagattaatgtagacattgatttaaattagaaacacagtaccacaatgctctaacatcagcaaaaatcattacttacagtttatgaaactgacaggagcaaatgccaatcaagtaaatagcctatatttagataacctaggtaatagttcagtggggagttttgaaaaagaaattatcatttcaatgccaagtcaggcttacagctttgaacaagtagcaaaacatggacatgtttctcaaatggatttcacagcatcagtgcaaaagccggaggggatggcttagttttttaagcctcagaattgaaatacctagactccctgcaactacagcattaaatcctctgtggaaccacagcttcaaatgctatcaggagggactcaactcttcatccttctgagactgataaattgaaagccatgaagtttagaggaaataagagagcctgcagcggtctgaaactcctccacccacctccaacacacacacatacacaaacacacacacacaaaggctctatttgcaacatcacttaagattccatttgaggctttccccttgttaagacttaagggtgttgtttttaagacatccagaaatctcacagtcctgccatgcaccatctttataagcattcaaaccaaatttcaggcagctccaagtaaactaaaaacattatttttaattctcatttaatatattcaaggaaattctaagtgattactttcaaatgcattataggtattgggccaactctttattcttcctgtggaaatttctgtgtctcaaattgatcaaattgatttctttttactgccttgtatgtttctggactgcctccttgacatcaattataggtacttgggaatggcaaattagaataagagaattttatttaatttgcctggtattacaccattctcccacatctcctacctcattcacaaagctttgtaaaataagaaagaatactattattatctccattttatagatgagaaaagcatggcttaggaagcttacatgagttaaccacagctgatacacagtcacctttttttaattttttttttaatagagacaggaatctcgctatgttgcccaggctggtctcaaactcttgggctcaagccatccacccacctcagcctcccaaagtgccaggattatggacatgagccactaggcctggccacaccctaagttttaaaatctaagtctggaaaatcctcctgaagtattgctagttataagtaagctctacttaggaacagaaacattttgccaaacaaaattgtgtaatgcattctaaatttaaataaaaatacttttacaaatagttcctttgatttatcagtaacactaaatatctctgccctgtgtataatgatttaaaagaatgaaaaattggagaggatgctggaaaaactgaggatcatttattttacggtctactactgaaacaggaaaagttcccttgtcgcccttgcagggcgtgtgatgggggtgtggctcgcttcttcagtgtcctgctgctcaaacctctataggggcatacagacgggcagattgtgaggctctgaccccacagcagtgtctaggtgtgaatgtttacagctgaagccccagtgggcatgtgttacagggtgctcttttagtttaaccgtctgtaggcggcttgtgttagctcaattagacccctgccttatcgcaaagacagagggctttctgtatcccgggttcttaccttggtgtacgggaagaattggatcacacgtgggcttgaagaatgagtggaaagttttattgagtggaagtagctctcggcagacgggggaaccagaagggagacggttttctcctggagtcaggtatggcggcctgactcttctctgacctcccgcgacaaactctgcattcttccgctggtcaatggcctgccagcatgccggtgtgctcctatgctggtgcgttcctttcgacatccagcagcccctgtattctctgcctatatgctcctctcaatgtccagctgcttgtgcgtctgcctgccagggtctcgggggtttttaaaggcacaggatgagggcatggcaggccagggtggtcttgggaaatgcaacatccgggcaggaaaacaaaaatgcctgtcttcacctaggtaggcccaggcccagggatgaagccctagctggggaccacgccctcctctacccagcacttcccgccccccttccttatcatttaaagggaccacgcccttcccttcccagcattcccttcccagcactttcctgcggcatcactacctgttaacaggtgttccttttcgtttagatttacctcaaaacaacggcgaaggatctaattatatttaggcccaaaagagcacctaagtgagagtaacagaaggttacttctagaactaaaatgaaaattattcttcaagtgttagtcaaaggaaaactactccagaaggaaccaaatatccagacgaatttaacttaagaaacagctacaatttaggcaaactggacagtggatccagtaggtattttagtagccactaagaagacactgaatcgggtagattctatagggattgcatattagttatttaaatacaaatatccggctgggcacggtggctcacacctgtaatcccagcattttgggaggtcgggggggtgggggcggtgggtggatcacctgtgtcaggagttcaagaccaacctggccaaaatggcaaaacctgtctctacttaaaatacaaaaattagccgggcatggtagtaggcagtagcaatcccagctactcaggaggctggggcaagagaatcgcttgaatgcaggaggtggaggttgcagtgagctgagattacaccagtgaactccagcctgggcgatagagcaagactccatctcaaaaaataaatacatacatacatacatacaaatatccatggaaaagttgatatattgagaccttctatcagccattcccactatagtgtaatttagctgtttctctgacaggaatttttatttaagaagaaagaatttggagaaatagacatagtaggaggtaacagatcaggctctttccaccagaagaaacacaaataccttaaaaaacaggaagaggctagagagatcagtggggtactaagaccaattttccatgtattgtattttacaatttttgctaaaggcatgtcctaattccttaaggctgcataaaaatactcagcccaggagctaaggaaaatttactcagaggacaatgtatgtttttctggctttcttaccctgtttcacccaagtttccagtttcacctgccattgggttatgattactccagcacagatgacttgttcctcttccaaaccccatgaaaggaacttagaaaatttgtctttattatatcttttaattaacacttccccaacgggataatgatacttctgggctatcttatgttctttaaattatgtatttaatttcctagcaatcaataagagccttgaaggttttgtaagtctcacaactcctacctagtttatatttttacatttatttatttatttatttttgagacagaatctcactctgttgtccaggctggagtgaagtggtgcgatctcggctcaccacaatctccacctcccggcttcaagcaattctgcctcagcctcccaagtagttgggactacaggcatgcaccaccacgcccggctaatttttgtatttttagtagagacgggtttcactatgttggccaggctggtctcgaactcctgacctcgtgatccacccacctcagcatcccaaagtgttgggattacaggcgtgagccatcgtgcccagcctagttcatatttttaaagtttgtatagatttatagatgcttttaaaaattatgtgattatgtgtcttgccttggcaacctgggcaggcattccagacacccaaagggattattagttcatgttcgcacgtctgcccagcaacaaaactgagcagcctccaccaagcacgtaaaatccccattcctcctcttattcatttatttagcacttaatagtgccaggcaggaaggtaaaaatacatttaaaaaggaatggaggtagccgtcttgccctggaggtgcaggaagctgcacttcagtgtgctaggtagagggtacataggccgtttctgtttttcttccagctcagggatttataatgagaggaagtgctacaaaaagctgtggtgcgaaaatgacggacgctatgaatggaaaaaaaatctaaaatcaatccggtcctaagcaaacacgcttcacctacactcataactattgcagacctccgaggcctgggatccccaagaatatactgagtttgacaaacttttcaacttcaactttaaattaaaaagacagtaaaagaaccaaatccatagtacacagcaatcggctaaagttcctggggccctgcaacccagagttgaataattttgtattaaattcccaatatcaagctaaatctattttaaccacaggaaaagcagcaacttgtctggctattttaaaaatctgaacagcacttaggaagaagcaccttagcgcagggaacagctcagtgccccgtgacacaactctcccgcgggcccagggacgcctcgtctcgcgagagttgagggacgcctgagcgaacccccgagagagcgggcgtgggcgccaggcgggcggggcactggggattaattgttcggcgatcgctggctgccgggacttttctcgcgctggtctcttcggtggtcagggatggcgcggaagtcgaacttgcctgtgcttctcgtgccgtttctgctctgccaggccctagtgcgctgctccagccctctgcccctggtcgtcaacacttggccctttaagaatgcaaccgaagcaggtgcgggttggcggcctgggcgggtggctgcgccgcgagagcttgcgggtggggatgactagcccgccccgctgcagtcacccggcagggcggacggaagagcgccgggctgggccgggcctcgcggtcccgccctctaggtcttcccgagtctccagcgccgctcagtctcttgcaagtggcctttactgcatcctccccacctaccgctgttgcattttaggtcctcccttcatgcagcccccagcgcaatgtattttccaccctgctgctgaccatagttatggcctttgtgctttaatcaagtagcagctacgcttttctgcctgacagtcttttcacgggctgtgtacgtctccacctctcgtttctaatccttcacttctttgcaattttgtagacgactaatagtgtcccagccatagcctactcttttcccatttactttttttgccacgtgttgtcatactttacctgccacttagaattcaaggttccaacctttgctgtacattcacactatctggggagcttctcaaaaatcatcctgccggggcccacctcctgtgactgtgatctaactgctggaatcagggccactgtttttctttaaaaagctccctaggtgatttcgatttgcagacagggttgagaaccactaagctaaggtatcacctcttccaggaagcgttccctgacttaactgccctcgtgtccagaatgagttaggttcctgccttctacaccttgttaatagcctttacgtaccattatcttggcattttcgcattgtactatgcttgtttctttcatttgcttaatgaccagaagagtcattttcagacccctcctcctccatctgaggttgctaacgtattaactttctagggcagaattggctccagaatttggtggcagtgcatacgattcagagaaaatgaagaagcaggctgtgagaaagatattcccagccataatgagacgaaaagaaattgcatcagcctgggcgggggacagttctgtgtttaagttgcctgtattgaaagagggaacttgcgtaaatacactttcaagcctgtaggtgctgtagtgatgcttgaagtgtttaccaaccagagcacccactcttcaaggaattctgttgttaccagaaaagaaattgtccatcaaagacccttccccccacacccccaaatgtatgggatcctggctctgctacttaccagctgtgtgaccttaaactaactgcctgacctgtggctctgtttacttttctttaaaatgagggtcgtgattgtacagtacctaccacagaagctgttatgaagactcaatgaactaatccatatgaagtccacgttgtaattgtttgctgttcagtattattaagacttcctgggataggtgttacctcaatacacatatcaattatgcatattttaatctaatgatgcagaagaaatgtgtgaagaaggctgcggtttagtggattttttatttaactgccttttagtggtttcgattgtaccttttaaaataaaggaggggatactgatttcgtttctcgcacacagaagagatagatattagtaagtgaaaaaaaaaaaaaccttcagcttgcaccaatagccagttttttgagttcttctgataactagttaaataattttgactcttcactgactcctttgtaacacttgataaactaatgtgttaaaaaatcagcttaactcagtaaatgtgaaaaagttgttaaattggagttggtttgttgcatttggcattgaaaaaaatatatatatataaacaagcattattgggatttgattaacagcgtggagggcattagcatctggaggctctgccctggatgcagtggagagcggctgtgccatgtgtgagagagagcagtgtgacggctctgtaggctttggaggaagtcctgatgaacttggagaaaccacactagatgccatgatcatggatgggtaagaacaccgttcaggtcctatttattatgttgagttacatttagagttgtggtcttctgagagcaagatgaaagaatgcatgagttttgacacagatcaaaacccctagcttattatacttgacctttctaaacacagtttccctctcaactgaaaaaaaaaaatcagagtaatagaaatatcacatggagagataggtagtcccttagaactgggagaatgccaagctaaaaaactatgtctctgaccttataaacaatcatttatctgctgtccacaaatgctgtggtttgcctgacctgaagccttcaggcccctttcaaaagccatatttaaaattagcttggagaaactgagaattttagtgctgttgtggtacatggcaagttgattttctatttttttccttaattttgtctgattgtgggaatctatatgaacttcgtggatgtgctgtcacttctgtgttaagatggtggagtttaaccgcaaaacactattgattggagaaaagcaatgtttttaatctatgaacctctgaaaactccttaattcctaactgcattctattttcttgcagcactactatggatgtaggagcagtaggagatctcagacgaattaaaaatgctattggtgtggcacggaaagtactggaacatacaacacacacacttttagtaggagagtcaggtatttttttaactacactgaaattttttctagtcttttgactatagttttcactgaaaaatagtacaaaatcatggataaaaccagatctaagttcaaattccagctgttttacttaacatctattgaactggataagtaacttttaaatctctttacttcttcatctctaagaagaaggcaatggaagttttgagacggagtttcgctcttgtcacccaggctggagtgcaatggcgcgatctcagctccctacaacctctgcctcctgggttcaagtgattctcctacctcagccttccaagtagctgggattacaggcacgtgccaccatgcccagctaatttttatatttttagtagagacggggtttcaccatgttggccaggatggtctcaatctcttgacttcgtgatccacccgcctcagcctcccaaagtgctgggattacaggtgtgagccaccgcgcctggccgggacgagaactcttataatgcatgccccaaaggttttaagtggatctgttttaggaagggcataaggaaatcgaaggtctaaaaattgagtctcttaaaactgttcatgtgtgaatattcctttgaaagtctttgtgtagctcacttaagatgctgctgacccagaatgtctctagtacatatatttttgttgaaaagacaatacttgaataatttatactttccttttttccaatctccagccaccacatttgctcaaagtatggggtttatcaatgaagacttatctaccagtgcttctcaagctcttcattcagattggcttgctcggaattgccagccaaattattggagggtatgcacacatttaatttaaaaaaataagttaattgaaaatattcagtgacatcctttctgctcagtgttgcctgcctgttgtccagggtactggttagcatcctggctgtacattagaactagtggttttagttgactctccaggtatggatgttcctgaaacacctctagctgcattgggtgcatatccagcatggagagctactggtctctcacagtagttttcaaactgaagtttctgccatgtggaggtggctgcctcaatcagggctgctctgcttgtatttctttctaactaagtctaaaaaatcagtttggaaactatgagtctaaaatatttcttagattttacgtgcagtgtatccagtatcttgttcttgacttgaggacatgtaatattacatgtctagtatgttaccagtggaataatttttctttaatgagacttttggcataaatcagtttgcctttgccgtacagggtccttctgtgggatatcttagtctctcatctatttcttccctaagtcctaattactttcgagtagccatcaagtcagaagtcccttgggttagcacttgaaagaggctaatcataaaacgaagttaggggaggcacctagcgcactgatgtgtaagacatgaggaataggaataggtttcttgctttaataccagtctacatacacaacctaaatttatgagtttgcattatattcttgagccctttagatttataaaggaatcttaaagcacaacttagaatatattcacataaacctagctttgaagaaacaataaaagcttttaaaacatattttactttaagtctcagaattctttggccaaggaacaaatttctgaaatttaaaggtccagtgtgtatctaatttctttaaggattaatatctaattttaaaaaattttactattgtgttgagaattttagatatatataaagagagaaattagggacctgtgtcatgcaatatagatacctcacctgtattatttaattcttagactagaatggatattcagtaaaattatttatcttatttgtttttatataagacttagtgatttcttagcttttaattcttatctttaagttaccagatgtctttttttggtttcttgctagtgtttagcgattgtacataatttcttggcaatttctaaaaataccctttgtaagaaataaaacttaaatcttgtttacagaatgttataccagatccctcaaaatactgcggaccctacaaaccacctggtatcttaaagcaggatattcctatccataaagaaacagaagatgatcgtggtcatgacactattggtaatttgccttttgtgcagtttttatggataaagtttagttaattatcttcctgtagctcttccctattcttctaccagaagttgattttgattgttttaactgccaattaagtgtgcctctctatagatagatccatcttgtcttaggatctgtataaaatttggcaaattatttatacaagacacctaaaacccaatgactattcacttgcggatttttaaatctttatttgacatttcattttttggcagttttatgttgctgtattttagtgaccttaaataactttttccaagttacaatgttgaaaatttacattagtctatgtcttagtttgtttttcgctgttataacagactaccacagactgggtaatttataaacaaaagtttatttgcctcacagttctggagcctgagaagttcaagaacagggcactggcatctggcaagggccatcccaaggtggaagtcaagagaatgagacaggaaatcgggtagaactcatcctttatatcaggaacccactccctgcgataatggcattaagcccttttagcctaatcgcctcttaaaggccccacctgttaataataattaataatgttaattgcctgttatagtggcagttaacaaaatacccagactggatggcttataaacaacagaaatttatttctcacagttacggaggctgggaagttcaaggtcaaggcgctggcaggttcagagtttggagacagcttgttttcctggctcatggatggcgtcttcttgctgtgtcgtcacgtggtggaaggggcgaggaagctctctggggcctcatttataagggatgaattccattcatgggggctctgtcctcatgacctaatgagctcccaaaggcctcacctcttgataccatcaccttgtggaataggatgttgacatgaatttgggggaacacaaacattcagagcacagcagttattaccagttgctcaattatttggttatatttgaggtaaactttatacacctacagtgattttttttttttaacttctaggcatggttgtaatccataagacaggacatattgctgctggtacatctacaaatggtataaaattcaaaatacatgggttagtgtttccaaaagaacagagctctcaaatatacactgaatgcagagcaatatatgccgggtgctatgggggttgcaaagcacagccctagtctcacagctgcgatgaatgagtgtgaaagaaaatgcagtactctctgctgagtgccacaggagagggagtcacagccagtgctatagggtttaggggtggcagaggtgatctctttaagctggggtagttaggaacaccagtaaagtgatgcttggagctcagccctgagtcatggtagttgaggttcagcgctcctactggctaggaaagttgtgtgtgtatatgtgtgtgtgtgttcagggctcccactggggtgtgtgtatgtgtgcatgtgttcagaactcccactggcttggaaagaaggggtgtgtgtgtgtgtgtgtgcgtgcacgcagaactactggcttggaaagaaggggtgtgtgtgtgtatgtgtgcgtgtgcgtgcacgctcagggctcccactggtgtgggtgtgtgtgtgtgtattcagggctcccactggctagggaagaaggggtgtgggggtgtgtgtgtattttggggtaggggaagtggtattggaagataagactacaagggaagactggggccagatttaaggagtcttaagtcagttgaaggcattctggatttaattttgaaatagaaaagcattaaacatttcttactagaaaaaaatctggtaaaagtttggcacattacataggaagcggaaatagattatagatgagggaaaccaattttgaacatgttgcaatcatctggaaattagatgataaaggatggtaataatagaatagtcactgtaaatctgtgccatcctggtatatacctggctgataacaagttcttttaaaaaattaattttaatgacaatgaaaattatgtgtatttgtggtgtacaacatgatactttgatatatgtatatgttgtagaatggctaaatcaagctatttaacttattatctcacagacctattttattatggtgagaacacttaaaatctacttagcagttttcagctgggtgcagtggctcacgcctgtaatcccagctctttgggaggccaaggcaggcagatcacctgaggtcaggagttcgagaccagcctggccaacatggtgaaacccagtctctactgaaaaaaaaaaaaatacaaaaaattagctgagcttggtggttcgtgtctgtagtcccagctactcaggaggctgaggcagggagaatcgcttgaacccaggaggcggaggttgcagtgagccaagatcaatgccattgcactccagctgggtgacagagcaagactcctgtctcaaaaaaaaaaaaatctacttcgcagttttcaaatgtgcactctattgttattaaccttagtcagcatgatccgcagtaggcctctggaacttaccctcctgcctaactggaattgtgtgtcctttgacccgcatctcgccaggtccccctccccccagcctccagtaaccaccattttagtctctgtttctatgagttcagctgttgtacactccacgtctgataacaaattcttacataattaatgcaggtttgtgaaaaccttagttaaaaaactaatgaagacctgttctgtctttgttccgatgaagaatttacttaaaacggtatcagaggctaagtggaactatcccttatttggaacagcttatgacttaatgtgttttacactcgatttcctgccctaaattgttaataccctctcaaagccgtgtaggagactcaccaatacctggagctggagcctatgctgacgatactgcaggggcagccgcagccactgggaatggtgatatattgatgcgcttcctgccaaggtatgacttcttagtttgtgaattttagagacctttggagaagatatttttttcttttaagatagaaaataatttttgaggctgggtgcagtggctcacgactgtaatcctagcattttgggagactgaggcaggtggatcacctgaggtcaggagtttgagaccagcctggccaacatggtctcgaactcctgaccgtttctactaaaaatacaaaaaatttagctgggcatggtggcacaagtctatagtcccagctactcgggaggctgtggtaggagaatcgcttgaacctgggagacagaggttgcagtgaaccaagatcgcgccactgcactccagtgtgggcaacaagaatgagactgtgtctcaagaaaataaaagaaagaaaacataatttttgtattgtgtaacctgaatttctgtgcacaagagcttcttagaaactgcatacaaacttgttgcctatcattttgataatgataatcattcaagttaagtaatcatagtcctgtgaaataaagtagtatttctcaccctgcttcccagatgagaatacttatgatctatttagtaattgatgtaaagctactgagtaaaggagctgtgataattgatggtaaaagtaggaagtgcagtcatcgtgtacctttaaccaccctagctagatgttgtgcccatgcacactactttcccctttgattgtagctgtttttctcattgaaaatctgtattctttttgagttctggccattacatttgactgtcggtatcattactgacagttattcagccaaagccaaaaataatattccacatctgaaattcatgggtggattagttgaaaagatagacactgtatcaaagtggacttgctttgtggatgctttaacagaagtaaccgactcttgttcatttatgtgtattctatcacatgtggcaattttggtggttttaatttctaacttcaagtaacccaatttggagttagtatttattctgagacactaaggtttcacctctgtttcaatcagctaccaagctgtagaatacatgagaagaggagaagatccaaccatagcttgccaaaaagtgatttcaagaatccagaagcattttccagaattctttggggctgttatatgtgccaatgtgactggaagttacggtaagttgtgtttggattttgtatttgtgtgaacttccaaatatttctaaaacatacactttttaaatattgttttgtacaatacactatattcaatagaaaaagagactccttaagtgggcattgagtaaatgttcattgatgatctcaagacccacagcgttaaaaatatacctaaaagcctctttggattgactgctggtagttatgacccagtctctgactagtagttcttatctttcacatgtgtcttaaatgaagtttagcttcagctccagtacacgttgacataggctaatctagtcaaatgtttatactaattaaaaatagacaaggataaattatcttccctatttcttttctattcattatttaaatgcctcagccatttagatcttctcggggctccaaagaacaaaatgtattactaattagtaaaccgaagaggttagcagaattatttttgcactgtttgaggcttgtctttcacttcatttactttccatatgagcctatcacagtttcaaagcattttaagatcagccactgctgattctcattagtgaattttcagatggggaagatacacagcttactgatcaatatgacttattaggttggactgcttattattgttctttgatcttttacttcccacagttctatatttgaaaaacttgtttgaggaatgctttattcttttttaagcactaagacacaaaagtcaataaaaattatgaaggggaaaagctttatgtatcaaataaggcagttctattgattccctcttaagaaataaaccttattagaaagctcaaagttggatttaacagaatgaaaaaaatgataattatataattgtggatgaatttacaggtgactagtttcttctatttaatgaccaaagaggaccctcccccaggtgtttgagcatgagaagatgaacttgattagacaaagcatcttgacaaattactcttgactcttcctgtgagagtagaagaatagggagcaatggtggggtatggggttatgaatgaatgatgagaatgttctagtggctagagaaataaaatgtgggagatgtgcctgaatagttttttctaagaaaaacacgtaagaacagttaaataatcgtagcagtgacagcatgtgtatagatcaacaacaacaacaaaaaccagccagttttctgaagttcaaagagatagtttaccagctacctcattcctttcatggactgttcactgctcagttctgaggaggatgacactagtgtatttccatgtggcttagacataaggtatacagtagccagtgtctagtcaaataagcagtatctgtattggttataaatatgtgcatcctatagttcaccaaacttctttctcatttttggccccaggtgctgcttgcaataaactttcaacatttactcagtttagtttcatggtttataattccgaaaaaaatcagccaactgaggaaaaagtggactgcatctaatccatctttactgtcaacatctgtatttaaagaagaaagaaacaaaggctgaaaaggctgctcactctcatcatctagtgttcctcatgtgttctaaagtctttttgtaaaataaacacaaaaataaatttatgttgaattggcactttctatatctgaaattgtattatctatttttatttaacctttcttatattatctgaagatgaatatgtatgtggctgtattttgtatatatttaagttttaagtgacacttggatttctgatcagtgttgcaaaaaattgctactttgagatttatttccacagtgatatattaaacccaaaaggaatcatcatatttggatgcttaaaatagagtatacaagttttttagacccaaagaaaaaaacagcagagtctcagcatgatcagtcctgattgaatttcattatgtcacagtgatgcatgtcttagcactgattattggttttacttaatattccctaaaaacttgaggaaggaagatgatagaacatgagatactctttgttttgtacatactagaaaatacagctatcttctgatgagcaattgtgttgattttctttgcttttttcctcttatggagctctcagtgtgtgaaagttctaaagccacaagaatcaatgatgttttagctgctaatatttagtattgatcgtttcttttaaaaatgatttggggaacttgatctgtactgtaattttactaattccttgtgcagaggtgggtatggcaattagaagtcaagaaatgggttgtttagcttggtttgtttccctaacttctgattaactctctgtatgacaactctacagaagttgtgcgcgtgctttctcagcagcatttttccttcaaaatcatctttttaatcaacagtcattaataaatgtacatgtacgatattcaaactttagaatttcagctgttttttctatgctcatcttatgttctttctaatttaggggagaaagctatcattttaagaacagtgtaagtcacttgttctgggaccttgctgtgtatcagaattgtttggggagcctctttctttaaaaatgccctctgtcccactaagtcagattctccataagtgaggacttgaaacctggaattagcaactactaatggcagccctacagcttcacactctcagagaaggaatcttcctccagggttatctgaggtatgctaacctgcttaaacctggtgctgggccttggaaaaagaaaaaaatcagatttaaacttgcggttacattaagatgatacttttgtatatttgctttccattaataaataaggcagtcatttacaaaatcaccaggaaaaggagaatgaagtattcatggcctgtcacttcccagcaaattgggagttgagctgacaaaagcaatccacatatgtttctaaaagatgttttctttttaagtcgcattcttcctcagagaaataatttccctatatttcttaagtaatggaattactttgtaaatacattcgtaaaattcagttttgactgtaatattatttaaataatatagatgtgtcttcttttgaaaagaattgtttgtgtgtccctagtgatgttgtatacggagggaacttctttgatgatgtgataccagtgttcacgggggttgtgggaaatacatgtaggaaactggtgaaatattaataacacagctgggaaagagaactgtgagccaatcagaaatacattgaatttggaagcggttcactaaaatgggaaaagcaagaaagtaacttgggaagggagccttagaaaatgtaatcatggtttaactttttttttttttttttttttgttttgagacggagtctcactctgtcgcccaggctggagtgcagtggtgcgatctcggctcaccgcaagccccgcctcatgggttcacaccattctcctgcctcagcctcccgtgtagctgggactacaggcacccgccaccacacccggctaatttttgtatttttagtagagatggggtttcaccatgttggtcaggctggcctcaaactccagaccttgtgatccacctgcctcggcctcccaaagtgctgggattacgggcgtgagccaccgcagctggacttgatttaactttttatgccagacagtagttaatggtttgcctcacatctgtcctggttgtatcattgtatagattgcatggctattacatagcataaggtaagggatctagttgcagaattttcttccccattctggcaagttgctttttgttgttgttgttgttttcctttgatcttataaaaaaatgttctatcacttgcctactgctaaggtgaaattagattgtcctaagcacatatatggattaagcaacttttctaagtgattctgagaacgaacatattgtcacttagatttttattatcagcttttgtattctctttctctctaaatggataaaaatttcagtgacaatatatatcaagtgacaatatctatagatacatgtagatatatataaagagaaaagtatatatgtatatgtatacatatataataagtatgtatatggaaagaggtataagtacttgccacctgattctattctctcctgttttctgcttacacctttcatctcataacattactattacagaatagcctaggagtgtagtgggcagtagtttgagcattcttttagctcaatttaacacccccacttagaaaaagaaactgatttttgatattagcaatattaaaatttcttgattaatactcctgagacttcagataaacatcactcaagtgctttgtgtttttagcacaataggcaaagaggaaaatgttaaccacggtatgtagtaaagattttggtagtttcatgctctttatttgctttgatcaatccctggaacttaaaaaaattatttcactgatttaaatgggcaacaaagactaattgtaggttgattcttatttctgctagccacagtgtaaactggttgtcatgaatcctgttcaccaaacatttccagctcttcctacctggcacatggtaggattgttcttttttgcctcttgtgatctggtccagccatgtgacgttccggtcatgagttttgagcattttttttcaaacctgacaacatgatggtggttgtccttgagggaccgtaatgaagagaaccccaggacagtgcaggatgcacgtgtagtgtgaacaagaaataagcccttttttttaaatttattattattatttttttgagacagagtctccctctgttgcccagaatggaatgcagtggtgcaatctcagctcactgcaagctccacctcctgggttcacaccattctcccgcctcagcctcccaagtagctgggactacaggtgcccaccaccacacctggctgatttttttgtattttcagtagagacggggtttcatgtgttagccaggacggtcttgatctcctgacctcatgatccgcccgcctcggcctcccaaagtgctgggattacaggcatgagctactgcgcccggccaaaataagcctttctgttgtgacacagcataaactaccctatcctgactgatacgtagagcatggttaggccaggcacaggggctcttgcctataatcccagcactttgggaggccgagacaggaggatcacttgagcccaggggtttgagaccagcctgggcaataacataattttgtagagacctggtctctacaaaaaatacacaaaattaactggatgtggtggctcatgcctgtagtttcagccaccgcagaagctgaggtggtgagattacttgagcctgggaggttgaagctgcagtgagctgagatcgtgccactccgctccagcctggatgacaaagtgagaccatctcaaaaaaaaagaaagaaagaatttaaagagtttttgtggaggttattaaactggtgacaaatgaaactctctaaaggacaaaaggaatttaaaaaaaatagatgcctagaaaggtatcattaggaaattaatcaaaaagttaaaggtactactttgtaggaaggttgtgggtgactttatcttaataatatttgtacgtttttaaaaaagaagcatccataccataagattccaactgtatgacaccagacagggaaaaactatgaagacagtataaagatcagaggctgccagcagttgtggggagggaggaatgaatcagcaaagcacagactacttttagggcagtgaaactgttctctataatactgcaaatggtggatgtcattttatcatttctccaaacccacagaatatgcaacactgagtgaaccctgtcgtgaactatggactctgggtaataatgatgtatcaatgtcaggtgtaccagctgtaacatgtacaactctgctggggaatgtgggtggtgtggaagaaagactgtgtatgtgtgagggcagggaatatcagggaaatctttgtaccttcctcccaattttgctgtgaacttaaaactgctctaaaaaataaagtctatttaaaaggaaaaaaagaagcatatattatttttatgatggaggcgggaaactcaagtattaaagttctttcatctgagtatgtgctgttgtataagagtagccagcattgattgaacacctaacaatagtaagcactttgatgtattatcatttaattctaccaaaagccagtgaggaaggtaatagcatcctgggtttagataattttatacatagtagctgcaattccttcaggcatgcatggtgctggcttttgttcaggactatcttttcaagaatgtttctatagcaaaaaacccttggaagattgagattccaaggggtttccctcctgggcaaggggcatgtttgttgctgtctagtacaataaaaataatgtctcccttggaggcaaaggttaggcaggtttgcttgcaacccttataaaagactggggtttcctaagcatgaggtccctcagctgagatgcacgcaaacttaacgtttgcagtatccacctgaacctgccccctctgtacccccactgggaccctagtagggatcagaacatcaaagtcctgttgtttactgtgctgtgactaataatgtcatttgtctctgacccacgtgtctcatgctttctgcctgttttcatgaagctatggcaagctaacttgttagctggcaagtagggtgaaacctctgacccttcacaattcttgatactgtcaacagtgcttagtaaaagagccttattttgttattatttgctttcccttgcaatacgtatttgagattaaaaaaaattgtacacttgcaggtaaatcgaagataagatcaaagactgcagttttgcaagttcgaaacctaaagaatgacttaacaaaagccaaggacaaccttctgagattgttttataaatagttcatataatgaacattgaattaattgcgataaagttttcaaaggaacacttattctattcaggaataccatctaaaacatctaaatgttaatctctttcctttgaagaaaataatcagatagtaactaacataattcaaatgtaaacaggctgcgtttaaaatgatgaatattctcatctttcaaaatagaaaatcaggagacactgtccgtaggaaataaaacaagaaacaaaggtgtaaatggttataggtattcaagaaaggatctctctcactacagtgatttaactgcaatggggagtgtgaggaaaatcctcgttatctacactcaattaatcaaaaaaaagaggtataagtaccacttcccttttagaatacggaggttatcaccaggagaagtcaatagtgatttcttatagggagtggaggtggaggtataagaagatcaccgataattccataagcctttctctactagaatttttaaaaaatcatacctacctattattttcataatatatcaaggttgattaaagctaactataaatgtgaaaccgtaaatggttcataggatcagaatttagaactagaatacacctttgagatcagctacagaaatctaactcctgtattttataggtaagctgacacttaaaagtgcctcataactcaggaggcgacatgactagttagtgtcaagaacatatcatttctctctgcctgtgatcatgcttatcctaccaagggtgctaccctaccaagggtgcacacactacagttaattctgtccttcaagagtctggtgtttcatttcttttcttcggcaacagcagtaaatcataaggttctcaaattctaagtcagatataatactcagataatctccagtatagtcatagaattatgcataaatgcagatcatacataaattataaacccaagtttctatattcttaaacaaaatgtgttcaacactctatgttcttactaacttactaggtttcctaacatttaatttgtatgcagaattatagaaatggtgaataaattaattgaattcataattctgatattctgagccacaaaggatccaatccatatttttaatggcagctgtagaacttaagtccatttaatatggactgttacttatagagtaactttttttaattttttaattttttttgagatggaattttgctctttttgcccaggctggagtgcaatggcgcaatctaggctcactgcaacctctgcctcccaggttcaagcgattctcctgcctcagcctccaagtagctgggattacaggtgagtgccaccacgtctggctaattttgtatttttagtagagaaagggtttcaccatgttcgccaggctggtctcaaactcctgacctcaggtgatccgcccgccttgacctcccaaagtgctaggattacaggcgtaagctactgcgcccagcctagagtaatacttttaaaacatatattttgtaacatttgcttgaattatttgataccttcacattaaaagatgacttgaagataagttatcagttaaaataagatgcagaaaccatgataacacctacttctttctctggatttggttcattttgtaaataattaagtgggcataccttacccaggtgtctcatctaaccacattggaaaggaactgccagctgctactatttaatttgattaacagtccattgccaaccaaataatcccctagtcagaggaacattttgaagccaagttacacaagtcaagttgaaattctatggcagatatacaaaatggaagggaaggaagtccctgaatatgaatatgaagaataggacaagcagaaatacatacatatgttatcatccaaaattgattgagaattgttcaaatccctccaacaccctggaggatcctagatattctcagaggaaccaatcctcaaatgaaaatttgagcacggttgtttactgagatactaagcagtggtagaaaagtttagccttctgaactagcctttctgaattaattttaatatcttatagtttggtttggaaacaaaccaaatcatggtttgattccagtgagatgaggtacctagaagagtcaaactgatagaaacagaaagtagatgagtggttatcagcggctgaggagaattaaaaacggagagttgtttaacaggtacaaagttttagttagagaagatgaaagtggttaatgatggctaagatggtaatttagtaataataatggttaagatggtaaatgttctgttatgtgtattttgctgtcaaagagagaaaggaagaaagaaagaggtggttgattttataaccatgtccaagacttaacccttgattagggcctcatatatatccctctctttctcccatcatgtattgagactgagttgtctgtgtaatttattataatatctctagtttctggcaactccagttgtaaagattcattcacactcagtcctatcactagttagctattggaagggtatgtagaccagaatagggcctttataagactcattctcttagtcattttagtatcgtaaatacctgaatataaagtagctaatcattatgcagatcatgtctaaaatagttttggttaaaaaagttgattccagccaggcccggtggctcacacctgtaatcctagcacttcgagaggccgaggtgggcagatcacttgagggcgagagttcacaaccagcctggccaatatggtgaaacctcatctctactaaaaatacaaaacattagccaggcatggtggcatgtgtctgtaatcccaactactcaggaggctgaggcaccagaatcacttgaacccaggaggtggaggttgcagtgagccaagattgtgccactgcaccccagcttaggtgacagagtgagacactgtctcaaaaaaaaacaaaagaagttgattccaataatctgaaagtgcatagtttttccacacaagcatgtggggcagaggtcacaatctgctagctctctagctaaatatatatctccatatgtattttgtctagctagcccagcatttaaaaatatttgagtttttggctagccacagtggctcacgcctgtaatcccagcactttgggaggccaaggtgggtggatcacttgaggtcaggagcttaaaatcagcctgggtaacatggtgaaaccctgtctctactaaaaatataaaaatgtgccaggcatggtggcgcaaacctgtaattccagctacttgagaggacgcggcaggagaatagtttgaactggggaggcggaggttgcagtgagccaagatcacaccactgcactccagcctgggcaacagagcaaagctctgtctcaaaaaaaaaaatacatatatatatatatgtgtatgtatgtatatacacacacacacacatatttatgtatatatatgtatgtatttatatacatacatattacatatatacaatatatatacaatatatacatatatacaatatatatgtatatactatatagttttctttcaaatatttaaaaataataatttaaaaaattatgtgccctctcatcattccttttcagtgttgtactggaaatcctagctagtccaataagataagacaagaaaagagaagttatccagattgggaagaaataaataaaactgtctttgtttgcagataacatgaaaagattgcctatgtagaaaatctgaatcaataagaaatctcctgaaactaacaagctgttatagcaagatagaagcattcaaggttagtattcagaagtcagtcactttctaatatattatcaatggacaaatggaatttaaaattaaaaacaaaataatgcctatattatcaccaaaagcataaaataattacatataaatctaacaaaaatatgtacaagatctatatgaagaagactataaaactcttatttaaaaaaatcaaagaagaactaaataaattgagagataccccatattcatggatagaaagacacaatattgccaagatgccaggtcttcccaacttgacctgcagattcaatacaattccattcaaaattccagcaagttatttcttgtatattgacaaactgattctacaatgtatataaagaagtacacgaccaagaatagctaacacaatattgaaggcgatgataaagttgaaagtctgactctacccaacttcaagacttacaaaaaaaacaacagtaattaagatactgtggtattgtcaacagactagacatatagatcaatagaacaaaatagagagaccagaaataaacccacataaatatagtcaactgatctttgacaaatgagcaaaggcaataccatcgagaaaaaaaataatctcttcaacaaatggtactacaccaagtagacatacacatgcagaaaactgaattgagaaacaaaacttataccatttcccaaaattaactcaaaatagagcatatacttaaatgaaaaatgcaaaactataaaactcctagaaaatctagaggacctgggtatggcaatgagttttagatataataccaaaggcaagatacatgaaaaaaaattgatacactggaatttaagacttctactctgtgaaagatgctatcaagagagtgagaagacagctacaagctgagagaaaatatgtgcaaaagacttggctgataaagcattgttatccaaaatatacaaagaacatttacagtgcaacaataagaaaatggacagcaagattttaaaatgggcaaaaggcttgaaaagacacttcactaaagaagatatacagattgcaagtaagcatatgaaaatttgctgctcatcatatgttattggggaaatgcaaattaaaacaatgatgagataccactatctacctattagaatagccaaaatcaaaacaaaacactgacaacatcaaatgttggggaggatgtggagcaacaggaactctcattcattactggtgagaatgcacagtggtacgtgcaaaatagaatacaatttggcagcttcttacaaaactaaatatgctcttaccatgtgatccagtaaccacattccttggtatttacccaagtgggttgaaaacttgtgtccagataaacacctgtacatggatgcttataaccattttattcacaattgccataacttggaagcaaccgagatgttttttggtagatgagtgaataaataaattgtcatacaataaatatgagctactctatataataaatagatataaatatttattatttatttgttattaatagtaaaatattattcactgctaaaaagaaaatagcttttgagccatgagaagacatggagaaaccttaaatgcatattactaactgaagtaagccaatctgaaaaggtcacatactctatgattccaaccatatgatattctgggaaagc

SEQ ID NO: 1036 - DNA, 2000 bp, Homo sapiens
ggcgtgggcgccaggcgggcggggcactggggattaattgttcggcgatcgctggctgccgggacttttctcgcgctggtctcttcggtggtcagggatggcgcggaagtcgaacttgcctgtgcttctcgtgccgtttctgctctgccaggccctagtgcgctgctccagccctctgcccctggtcgtcaacacttggccctttaagaatgcaaccgaagcagcgtggagggcattagcatctggaggctctgccctggatgcagtggagagcggctgtgccatgtgtgagagagagcagtgtgacggctctgtaggctttggaggaagtcctgatgaacttggagaaaccacactagatgccatgatcatggatggcactactatggatgtaggagcagtaggagatctcagacgaattaaaaatgctattggtgtggcacggaaagtactggaacatacaacacacacacttttagtaggagagtcagccaccacatttgctcaaagtatggggtttatcaatgaagacttatctaccagtgcttctcaagctcttcattcagattggcttgctcggaattgccagccaaattattggaggaatgttataccagatccctcaaaatactgcggaccctacaaaccacctggtatcttaaagcaggatattcctatccataaagaaacagaagatgatcgtggtcatgacactattgccgtgtaggagactcaccaatacctggagctggagcctatgctgacgatactgcaggggcagccgcagccactgggaatggtgatatattgatgcgcttcctgccaagctaccaagctgtagaatacatgagaagaggagaagatccaaccatagcttgccaaaaagtgatttcaagaatccagaagcattttccagaattctttggggctgttatatgtgccaatgtgactggaagttacggtgctgcttgcaataaactttcaacatttactcagtttagtttcatggtttataattccgaaaaaaatcagccaactgaggaaaaagtggactgcatctaatccatctttactgtcaacatctgtatttaaagaagaaagaaacaaaggctgaaaaggctgctcactctcatcatctagtgttcctcatgtgttctaaagtctttttgtaaaataaacacaaaaataaatttatgttgaattggcactttctatatctgaaattgtattatctatttttatttaacctttcttatattatctgaagatgaatatgtatgtggctgtattttgtatatatttaagttttaagtgacacttggatttctgatcagtgttgcaaaaaattgctactttgagatttatttccacagtgatatattaaacccaaaaggaatcatcatatttggatgcttaaaatagagtatacaagttttttagacccaaagaaaaaaacagcagagtctcagcatgatcagtcctgattgaatttcattatgtcacagtgatgcatgtcttagcactgattattggttttacttaatattccctaaaaacttgaggaaggaagatgatagaacatgagatactctttgttttgtacatactagaaaatacagctatcttctgatgagcaattgtgttgattttctttgcttttttcctcttatggagctctcagtgtgtgaaagttctaaagccacaagaatcaatgatgttttagctgctaatatttagtattgatcgtttcttttaaaaatgatttggggaacttgatctgtactgtaattttactaattccttgtgcagaggtgggtatggcaattagaagtcaagaaatgggttgtttagcttggtttgtttccctaacttctgattaactctctgtatgacaactctacagaagttgtgcgcgtgctttctcagcagcatttttccttcaaaatcatctttttaatcaacagtcattaataaatgtacatgtacgatattcaaacttt

SEQ ID NO: 1037 - protein, 207 aa, Homo sapiens
MARKSNLPVLLVPFLLCQALVRCSSPLPLVVNTWPFKNATEAAWRASGGSALDAVESGCAMCEREQCDGSVGFGGSPDELGETTLDAMIMDGTTMDVGAVGDLRRIKNAIGVARKVLEHTTHTLLVGESATTFAQSMGFINEDLSTSASQALHSDWLARNCQPNYWRNVIPDPSKYCGPYKPPGILKQDIPIHKETEDDRGHDTIAV

SEQ ID NO: 1038 - DNA, 2076 bp, Homo sapiens
ggcgtgggcgccaggcgggcggggcactggggattaattgttcggcgatcgctggctgccgggacttttctcgcgctggtctcttcggtggtcagggatggcgcggaagtcgaacttgcctgtgcttctcgtgccgtttctgctctgccaggccctagtgcgctgctccagccctctgcccctggtcgtcaacacttggccctttaagaatgcaaccgaagcagcgtggagggcattagcatctggaggctctgccctggatgcagtggagagcggctgtgccatgtgtgagagagagcagtgtgacggctctgtaggctttggaggaagtcctgatgaacttggagaaaccacactagatgccatgatcatggatggcactactatggatgtaggagcagtaggagatctcagacgaattaaaaatgctattggtgtggcacggaaagtactggaacatacaacacacacacttttagtaggagagtcagccaccacatttgctcaaagtatggggtttatcaatgaagacttatctaccagtgcttctcaagctcttcattcagattggcttgctcggaattgccagccaaattattggaggaatgttataccagatccctcaaaatactgcggaccctacaaaccacctggtatcttaaagcaggatattcctatccataaagaaacagaagatgatcgtggtcatgacactattggcatggttgtaatccataagacaggacatattgctgctggtacatctacaaatggtataaaattcaaaatacatggccgtgtaggagactcaccaatacctggagctggagcctatgctgacgatactgcaggggcagccgcagccactgggaatggtgatatattgatgcgcttcctgccaagctaccaagctgtagaatacatgagaagaggagaagatccaaccatagcttgccaaaaagtgatttcaagaatccagaagcattttccagaattctttggggctgttatatgtgccaatgtgactggaagttacggtgctgcttgcaataaactttcaacatttactcagtttagtttcatggtttataattccgaaaaaaatcagccaactgaggaaaaagtggactgcatctaatccatctttactgtcaacatctgtatttaaagaagaaagaaacaaaggctgaaaaggctgctcactctcatcatctagtgttcctcatgtgttctaaagtctttttgtaaaataaacacaaaaataaatttatgttgaattggcactttctatatctgaaattgtattatctatttttatttaacctttcttatattatctgaagatgaatatgtatgtggctgtattttgtatatatttaagttttaagtgacacttggatttctgatcagtgttgcaaaaaattgctactttgagatttatttccacagtgatatattaaacccaaaaggaatcatcatatttggatgcttaaaatagagtatacaagttttttagacccaaagaaaaaaacagcagagtctcagcatgatcagtcctgattgaatttcattatgtcacagtgatgcatgtcttagcactgattattggttttacttaatattccctaaaaacttgaggaaggaagatgatagaacatgagatactctttgttttgtacatactagaaaatacagctatcttctgatgagcaattgtgttgattttctttgcttttttcctcttatggagctctcagtgtgtgaaagttctaaagccacaagaatcaatgatgttttagctgctaatatttagtattgatcgtttcttttaaaaatgatttggggaacttgatctgtactgtaattttactaattccttgtgcagaggtgggtatggcaattagaagtcaagaaatgggttgtttagcttggtttgtttccctaacttctgattaactctctgtatgacaactctacagaagttgtgcgcgtgctttctcagcagcatttttccttcaaaatcatctttttaatcaacagtcattaataaatgtacatgtacgatattcaaacttt

SEQ ID NO: 1039 - protein, 344 aa, Homo sapiens
MARKSNLPVLLVPFLLCQALVRCSSPLPLVVNTWPFKNATEAAWRASGGSALDAVESGCAMCEREQCDGSVGFGGSPDELGETTLDAMIMDGTTMDVGAVGDLRRIKNAIGVARKVLEHTTHTLLVGESATTFAQSMGFINEDLSTSASQALHSDWLARNCQPNYWRNVIPDPSKYCGPYKPPGILKQDIPIHKETEDDRGHDTIGMVVIHKTGHIAAGTSTNGIKFKIHGRVGDSPIPGAGAYADDTAGAAAATGNGDILMRFLPSYQAVEYMRRGEDPTIACQKVISRIQKHFPEFFGAVICANVTGSYGAACNKLSTFTQFSFMVYNSEKNQPTEEKVDCI

SEQ ID NO: 1040 - DNA, 1799 bp, Homo sapiens
ggcgtgggcgccaggcgggcggggcactggggattaattgttcggcgatcgctggctgccgggacttttctcgcgctggtctcttcggtggtcagggatggcgcggaagtcgaacttgcctgtgcttctcgtgccgtttctgctctgccaggccctagtgcgctgctccagccctctgcccctggtcgtcaacacttggccctttaagaatgcaaccgaagcagcgtggagggcattagcatctggaggctctgccctggatgcagtggagagcggctgtgccatgtgtgagagagagcagtgtgacggctctgtaggctttggaggaagtcctgatgaacttggagaaaccacactagatgccatgatcatggatggcactactatggatgtaggagcagtaggagatctcagacgaattaaaaatgctattggtgtggcacggaaagtactggaacatacaacacacacacttttagtaggagagtcagccaccacatttgctcaaagtatggggtttatcaatgaagacttatctaccagtgcttctcaagctcttcattcagattggcttgctcggaattgccagccaaattattggaggaatgttataccagatccctcaaaatactgcggaccctacaaaccacctggtatcttaaagcaggatattcctatccataaagaaacagaagatgatcgtggtcatgacactattggcatggttgtaatccataagacaggacatattgctgctggtacatctacaaatggtataaaattcaaaatacatggccgtgtaggagactcaccaatacctggagctggagcctatgctgacgatactgcaggggcagccgcagccactgggaatggtgatatattgatgcgcttcctgccaagctaccaagctgtagaatacatgagaagaggagaagatccaaccatagcttgccaaaaagtgatttcaagaatccagaagcattttccagaattctttggggctgttatatgtgccaatgtgactggaagttacggtgctgcttgcaataaactttcaacatttactcagtttagtttcatggtttataattccgaaaaaaatcagccaactgaggaaaaagtggactgcatctaatccatctttactgtcaacatctgtatttaaagaagaaagaaacaaaggctgaaaaggctgctcactctcatcatctagtgttcctcatgtgttctaaagtctttttgtaaaataaacacaaaaataaatttatgttgaattggcactttctatatctgaaattgtattatctatttttatttaaccagcactgattattggttttacttaatattccctaaaaacttgaggaaggaagatgatagaacatgagatactctttgttttgtacatactagaaaatacagctatcttctgatgagcaattgtgttgattttctttgcttttttcctcttatggagctctcagtgtgtgaaagttctaaagccacaagaatcaatgatgttttagctgctaatatttagtattgatcgtttcttttaaaaatgatttggggaacttgatctgtactgtaattttactaattccttgtgcagaggtgggtatggcaattagaagtcaagaaatgggttgtttagcttggtttgtttccctaacttctgattaactctctgtatgacaactctacagaagttgtgcgcgtgctttctcagcagcatttttccttcaaaatcatctttttaatcaacagtcattaataaatgtacatgtacgatattc

SEQ ID NO: 1041 - protein, 344 aa, Homo sapiens; identical to SEQ ID NO: 1039

SEQ ID NO: 1042 - DNA, 1053 bp, Homo sapiens
ggcgtgggcgccaggcgggcggggcactggggattaattgttcggcgatcgctggctgccgggacttttctcgcgctggtctcttcggtggtcagggatggcgcggaagtcgaacttgcctgtgcttctcgtgccgtttctgctctgccaggccctagtgcgctgctccagccctctgcccctggtcgtcaacacttggccctttaagaatgcaaccgaagcagcgtggagggcattagcatctggaggctctgccctggatgcagtggagagcggctgtgccatgtgtgagagagagcagtgtgacggctctgtaggctttggaggaagtcctgatgaacttggagaaaccacactagatgccatgatcatggatggcactactatggatgtaggagcagtaggagatctcagacgaattaaaaatgctattggtgtggcacggaaagtactggaacatacaacacacacacttttagtaggagagtcagccaccacatttgctcaaagtatggggtttatcaatgaagacttatctaccagtgcttctcaagctcttcattcagattggcttgctcggaattgccagccaaattattggaggaatgttataccagatccctcaaaatactgcggaccctacaaaccacctggtatcttaaagcaggatattcctatccataaagaaacagaagatgatcgtggtcatgacactattggcatggttgtaatccataagacaggacatattgctgctggtacatctacaaatggagactcaccaatacctggagctggagcctatgctgacgatactgcaggggcagccgcagccactgggaatggtgatatattgatgcgcttcctgccaagttagtttcatggtttataattccgaaaaaaatcagccaactgaggaaaaagtggactgcatctaatccatctttactgtcaacatctgtatttaaagaagaaagaaacaaaggctgaaaaggctgctcactctcatcatctagtgttcctcatgtgttctaaagtctttttgtaaaataa

SEQ ID NO: 1043 - protein, 257 aa, Homo sapiens
MARKSNLPVLLVPFLLCQALVRCSSPLPLVVNTWPFKNATEAAWRASGGSALDAVESGCAMCEREQCDGSVGFGGSPDELGETTLDAMIMDGTTMDVGAVGDLRRIKNAIGVARKVLEHTTHTLLVGESATTFAQSMGFINEDLSTSASQALHSDWLARNCQPNYWRNVIPDPSKYCGPYKPPGILKQDIPIHKETEDDRGHDTIGMVVIHKTGHIAAGTSTNGDSPIPGAGAYADDTAGAAAATGNGDILMRFLPS

SEQ ID NO: 1044 - DNA, 80461 bp, Mus musculus
  misc_feature (1)...(80461): n = A,T,C or G
gtggtttctgccagcttattccttaatttaagtttctggtttgaactactgtgtgcttattggaaattccacatttacaaaatagaacattagagattatagtgtcaatactttttttgagtgactcctgtcctctcaagctataactttaatgttgaaagttaaaagttatattactaagacctactaagattactaatactttaagcatacagctttttagaaagtacagttttagttggagagagtgttttatgcctttgatcccagagctcctggggcagaggcagggtggatttccatgagttctcacagtgtgtgtttcaggccaggcagggatgtgtagtgcgcccatggttttgttttttaaaaagcatagcttccatggatttaaacggctttagttctcatttggatatactaaattctgctcagagttacactgtatacttctgaataaacagaatggatctgtgacccatcttactaataatactttcagcgatacttgtagacaacacccaatcgttggaaaaaaaatctaaagttccaaaagatcaagcttaaaagttaaattacaaacaaacaaacaaacaaagttagccatagtgacacatgcttgcaatctcagcacttggatgtaagaggatccgaagttcaaaattatccttagctacatagcaagttccaggccagcctgaaccatgtctcaaagaccaccaccaactacaaaaccacaaaataatatttttatttttctaaggagtctgttgtcgttactaatataaacttgtattcagaaatattttaagtgaatatgtgttctgtaaagaagtttatttctgttcactaggattggattctgataaaataaagtcattatttcctgccagttgcaatgtagttttgctgaaacccgctggaagagcagcctgccctcagagtacttgtggtctcggtgttcagtgatgtgagggagagggtcagaccctgctaagggcttttcaaatggagatagctctgagagctgcccactggctgatttaacaactggaacgtaggcacagatagcataattattatcaaaagagagaatatacagaaacgatgtcagtcatttgtgtgtgtgctgtttgtgtttgcatatgtgtgtgtgcacatgtgtacgtgtatgcacttgtgtgtggaggccagagctccgtgtcaagtgtcttcctacctttactttccttaagacttatttatttgtatgttacatgtatgagtgagtgttttgcctgccaggagagctgggtcaaactggatctagagatatattatgggccatttcgagctgcaagctgtcatgtgagtgctaggaactgacccagtcttctgcaagaacaggaagtactcttaacctctaagccaagccaccgctccagctccccgacctcatgttttagacaaaggcctcttctgaacctaaagcttcccccacacacacacacacccttggctaaggtggctaaccattgcgcttcagggatccacctgtctcctcctcacaggaggcaggttacacctgattttttaacgtgggtgcgggggatctgaacttaggcctttatgcttatgaggggagcgttttatccactgagtcacctcccagacctcgggtcaggcctggtggttttccatttgtttgcttttgtaagaaactgaatagtgggaagaaacttgctaaactcctgtttagtttcttagatgattttaagtacttaaaaggaacatcggcggtttccactcagagcatccagggctcatggtttacctgaaggaaaagtcttggatggattagaagctcctggggtgagtgtgtgcaccgttgtcatcgttacacagggaatccggtgtccaggagctggtactaaaaaagatgtttggaccagacaccagaaaatggagatacttttagataaccttatcgactttatcattacttgtcgagttgattaccgaacactagtggacattttctactgagtaaatggtattttcagtacatttgattttcttatgaagtcaggaaaaattatcctattctaacaacagaaaagaaagggttaaagccagtgcaaagatccaagcctttaagtgtgccttctcggactgttttgttgtagccctgtgactgatcactattaggttagtgtggatggacacacctcctttaagaacaacagatgaagctaggctaatcacacaggcctgtaattccagtgactctagagactgggggaggaggacacaaattcaaggcttgcctgggctccagagtgagttcaggccttcttgggcagcatagtgagattatctcagaagaacagggtctcagtagtagagaactcacctatcatatgcgaggccctaggtttagtcccttgtgtcctttggacaaaagggaaagacaagaacaccaaaagatatccagctatgcaagaaagcccaaagctggccgggccagttgcacaacagtgagatgcgtcgtggtgctctggtagaatgggaatccaaaagtacgatttggccaagtttttagaaagatgcgtatattcacgtttgtcacacagtataggatagagctgtatcattgaatgtatttttgttttccttggtgtgcctgggaacttggtaaagcctctttcctgtgcttaaactggcggcagttactcacaacccttgtgactctggtttctatagcgtgtgggcagttttgggaggaaaaaaaatcacgtaaaaagagaaattactagcttcatagcgaaactgaaggtgtctccatagacaagatcttttttgttttgttttgttttgttttgttttgtttgtttgtttgtttttcaagacagggtttctctgtgtagccctggctgtcctggaactcactctgtagaccagaatggccttgaactcagaaatccacctgcctctgcctcccgagtgctgggattaaaggtgtgcaccaccacgcccggccatagacaagatcttaacactttgttctcaagattaaatttaaggaagtggcttaaagtatagtccttagcctggtaaccctgccaaagtctaccgctcagtgtctgagtctctcagctgggtttttttgtgtgaaatgatcactgtaatattaagtaaagatcttagtctattaagtttggtactttcaaaaaaagaaaaggacacaggaagcctcctccaagggggtctgtttgtttccgtgataattcttgtcatgatgtcacattttatcttactaagtcacacccaaagcttatgtgggtcttttgtattcccatcagcgtactgaacctagaaacacttcatagttctgccctaggccctcaggtagacgctgccaatgacaaggtgaccttcagtccctttctagttcaggagtcttgaaatatatttggatatttggagtcttgaaatatatttggatatttggtcatttcttacaagggatgatgctctgtgcagtggtctcagccttcctaataccacgactatttaatcaagttcctcatgttgtggcccctattcatgagattattttcaatgctacttcataactataattttgctactgttatgaattgtaaatatctgatacagaacccttaaaggggtcatgacccacaggttgagaacccactgccctagatctccaagaactggtgagatcttcatttaatcttggacttatcagttttaagacctgattaagcacaaattatcttctacagacatgtgtaagaacacacacacacacacattcctttaacatgcacacacaacatatgatgctcgggtgggccacaactctcagtgccaccaattttcagctctttgaaaggagaagcacttgaaggtctggtcagatgggttagtttggagtccagctgtattaaacagagcacaaggctccagggcctgagcatcctacatcccctcacatcctaccacgtgtgcagtgaggccaaggggccctttcctgcaggcatactgtttcctttaaactggtagcgtctagctgattttgacagcctcccttccggttctttgcctgtttcttctgttgagggtgagtgattgcagcccaagacatcgtgtgaattttccagttaaaagggtcgttttgagtcgggtgtggtggcacacgcctttaatcccagcactcgggaggcagaggcaggtggatttctgagttcgaggccagcctggtctacagagtgagttccaggacagccagggctatacagagaaaccctgtctcgaaaaaccaaaaaaaaaaaaaaaggtcgttttgtttaatttctttggtgtgcttgtttattttgttttggagtatttttaatcgttaactggagagtattgtgtgctacttctaaattctgtggctcgtgagtgaggacgtggttcagcagtggccattttctctaagctgttgtttatcaaggggccatgtaagtacatgagctcaaccttaggacctgtgatttcacacctactccagaatactgtcatttgcttgagagaccatttttatagtccttttagattagtgtcatctctaccaaggcatgatcatcccacagaaacgccacccataaaaaggatttggggaagttgtaaggagagagtgactagtctgaccttacttcggtttcacattaccatctggttagaagtggttgtatttttccatccttttccacctttgactgtaactatcttgtaacagtacctttcggttctctctgcgttcctagtcaacggtgagtcactggctttggctggagagtaagtcagtcgctagaatagcaccatgagtcacagaggcttccgactctcatctactctctggaagaaggcgttcacagctttgcttctccagggagttaagagtgacactgttggtgagctgccctccgaatcacttgacattcagagttgacaccgattattcttaatggatgtggagtttgacaggcagttctagtatttggttttaccttcacagttactgtcgtacaggctttgagaagccaatggattcaattttctggcacaggtatgtgtcatcagaacacactatcatgcagagaggatagttatgaccctggtgaattcatgatgttgccaggaagggtctgtctgcctgttggtcccaattccatattctccattttgcatctttgccttttcttccgtctctcttactacaaaagcacaaactgtaggattcatttatccagaaaatatttattgatgatatctatacaaagacagatgctgaggacacaagaatcataacctttgtttcttcaccagactgccagtggagtacagaggttgagggacccaatccaaccttccacctgtctttgcatataaagttttattgagcataattgttcccatctgtttacatagtacctgtgacctcttttatacaataactgactttaatagctgtataagagaccttgtgatttgcaatgtatcatgcagataggatagttatgaccttggagaattcataagatattaccaggaagggtctgtttgagtcttagcaaaacttgcctagcccctggctcttaggtaataatagagacactgcacgaatacagcccagaggatagcaaactcttgtcagtactgttagagaatttactgagaatcatggccagataggtgaaacataagcaaccaaagctaatatcctcatatttgattataagaaagtcctcctgagtgttgtgaagggttgtgaagatgagaaggagagacggtacatatggaagaagggacgcgagcagagacttcagtcagtcagagtgcagatttgaactctactcagtactgactctgatctcagatcatttggtcagggctttctgggtgataatggtcatacctcactcataaggttagacaagctggagtacaggaagcaggtggagcaccgagtccaaatgaatcctagtactactctcagaaaaatctttcctaaaggtgactggccagcatgaagaaagcacagagagcataacggaagcaggcaaactcaagagctaccccggggacagaactaacaggcaatcgggagggacagaagaacgtcagtagtgcagctaaaagcaaaacaagaggttgacatgaaatgtggctttggaccccgttggccgaatagacggtgggtgacccagggtttgaggtagggaagacaatgaggcaaacagcaggttctgctggggcgtgttaaatagagataatggagacggatggaaaggtctgggaaacctttgtgtaaaaggatctggaaactgcaagtgtggtgtggcctagggaagcgtcagtgtaaaactggttgctgacttggtagagagagggtaacttgggatgaagacagaacagacttcttctagaaccctgaaaaacactagcagcataaagttggacagagaaccattaggtgagagacaagatccaaacagcttttaatggaaggtgcacatgaggtttgaatctgtctcagaccttccttggtgacataggaagttgagcaatactccccgacttcagctggaattttcattttgtatgttagcctaggatgggtatcccatgactcggggagcttcatttcctgtgctgttatttcgtccacactcttcttctattcctctattgcttcctcctatgagacagacagtagttaatttagggtatggtgtgggtgtacagaccgttcctccatatccactgacaggtcctttccccagctttagccggttctcacacccatgatgtgaaaatttgacataaaaaaaaaggcttccaaaaaaaaaaagtcctttttatgttcaatttggctcaatgtcagtaatgtctgcctcataccctgtagggtttgctaatgctttctgttgtgatttgcttacagcactgtacacatttgaacgggcaaagaagcagacatctcccatcatcagaaccacaccttggctccaatgcttgcccctctgttgcagaattagtcctacttagcatgcactttctgtatgatccgttaatcccttgggactcttcagaccgttgtgaacattttttttttttggcatgatgaccttctagttatttatttttgttgtttaaattagtatacaaaagtaatggattccacgatgggcatgctggggcacgcccttgatcccagcactctggaggcaaagccagggtgggtggatctctgtgagtttaggccagccaggggctctgttacacagagaaaccctgtctcaaaaccacacacacacacacacacacgtgatgggtttctctgtggcttgtttgtgtgagtaagagagagattatatgttgttttggtttgttcccctcccccacaactctcccctgtgtccttgctatcctctgcctgcccccccccccccccacacacacacacgttcctctcttctgccttctttttgcactgccttctctatttgtaattatttgcctctggccttactgtgactcaaaagttagactcaagcccttaacccagctgtggccagtcagagatctgatccaaaagccttaccttctgaaagaagattgatatgatcaagctgtgttgcgtcttatagttcatgttttaaggacagttgtgtgaaagtttaagttaaccctgacaactagtgcatttcacccagttctctgattttttacacttttgctatctttggggcattttgaaacctatacaaaggactcttgcccaatgaaatgaaaactaagtataatagaatacaattgtttgctgccctataagctaatattcttgctatttatgcagttatttgttctttgggcttatccttgagtccgttgtaactcgttatgtgttctcattaactgtgttactaacatctacactccaagttaaaaatctcttgttaatatctgtaggtgaagacactgcttgtaagaatatctggtaagggcagctctctcttcagcttggacccttccacctacacagatctttccgtcagaaatcctcagtgcctttgcttctgaggtgccgtatgttaaccttttgctaagctactgccattctgtttcacaaagcagtgtttctcaacatgggcccctctcaggggaccttgaagaatactaaagtgccctgctcttgggcactgggatttaactggtctgggcatgtggagtttggaaagcaccccaggctgtaatgtctaataatatgtaacatgtaacaagccacaccttggcttcaatgcttgtccctctgttgcagagttagttgtatttagggtgcacgtttcttatggtcagttaatcccgagggactctccagtcctttgtgaacctttttagtatgatgactgtcaagttatttacttctgattttaaattcatatacaacagaaatgggtttcactgtggcaattttgtgtatctgtatgctagtataagagggattatattttgttttcatttgttcatatatgtctcaggggaaattcataatcaattggtagctacgactgcctcggcagaaggaaaagcaggaaatggtgattttcattgtgtgcctattggatctgtatcttattagatactgtgatacttctgaaataaactgatcattttttttaaaaaaattgattttgaattctctaaacttaatcctgagccatacgattgccatctgaaataacttactacgaaaatgtctatctctgatgaattataagtaattaagcatcctagacatcagtgttatacctagagctctcgtgtatttcttaaaatgaagttttaaactttaattctcaagttaaattcaatttaaaatttttcctagaatggtgtagttctgttgacctattaggggacggtgtcattgtagcgtggggtgacctggcatatgagttggcctgctttgcagttttcctgctccgctgggctgactctgtacctcatgtgcccaattaccagcttatgccctccctttaaactaatagttctcaggcttaggtgcatattacaacttggggtgctttcaaaactccacatgcccagaccaattaaatcccagtaccagagagaagggcactttagtattcttcaaggtcccctgagatggggctcatgttgagaaacactgctttgtgaaacagaatgacaggtgtttggcaaaaggttaacatacggcacctcagaagcaaaggcactgaggatttctgacggaaagatctgtgtaggtggaagtgtccaagctgaagagagagctgcccttacgagatattcttacaagcagtgtcttcactgtattaccacgaatgtggtaaaatcagcacagagaatagtttaaaaggccatgctggcttggttacagttatctgagttttgtttggttttgtagttaactcagccaaactcactgagtagaaaaccctgaattgggaccgactgcataactctaccttgttcctctgtcatttggggcacagagccagctggctgatgggtgacacgcatctgatatcactgctaccatatggctgaattgctaacaaaaggttcaatttgtcatataccagctagctgaaaaacacggcggtagcctaagaccaattaagtgtctgtctcaatcactgagaagtcttttagagagagttatgtttataaagagacaagtaaaaatgtgtgcatctgaatagcttgtttggtcatgcttcctttccaatctgaaagatgtcttcccgtgcaacatcatgattaatcgtgtcccgcttgcggttcccagtttagaatgttttattgttgcctaggcctattcttgaaagtgaaattttgtatcatgaactctgctgtggttgctgtgccttcacgtactcattgtatatcccctcccttttatataggaagacagagatgtcaataaccccttgcctaaccgaggaggcaatggactagctcctggagatgacagattcaaacctgtggtaccatggcctcatgttgaaggagtagaagtggacttagagtctattagaagaaaaaacaaagccaaaaatgaacaggagcgccatgctggaggagattcccagagagacgtaatgcagaggcagtaccttacatttaagcctcagaccttcacctaccgtgatcctgtgctacgcccaggggtcctcgggaactttgaacccaaagaacccgagcctcacggagtggttggtggccctggagagaaagccaagccattggttctgggaccagaatacaaacaagcagttcaagccagcattaaggagtttggatttaacatggtggcaagtgacatgatctcactggaccgcagcgtcaatgacttacgccaagaagagtaagcacaaccctcttgtttctaaacttggggcagctactgtctttagagatatgtccatttagggaggtggctaggaagggaggaaatgtctgtgcctttgtttcagtgaaataatagaaccttggttcagcaacatggtcagaaggaggggtactctatttcatcatcatattgaagacaaggtgcattaattctggggcctgatacatcagtgctagaaagagtgtggtcccagactcgcaccagtctatgagtactgtttccagtccacagtacatgactgagctagcaccagaatgaaaatgaactacaccactaaataatttgtgtatcgagtggcagagctcccttactgtgtgttttcattctgggacaagaaagcccctcatcttgtggagcagtagcaggtcctgatgctgctaaggacatctcatgtccttaactagatttatggttcctgtgacttctcccctccaatcgggaacagaaattgaaacagttgagttatatgcaaaaggggtactcagaaaattgtggcttagacttttaaattctgttcccgtgttgtgatttttaagtgacggattttcagctcttagcttttgatagacagtgattatcgagtgacttcaatgctttctcttccagcttattcaataattggctccactactgtgggatctaagtagctttcatgcatgtgaatacagattgaattgacgatgtctagcaaactcttaaaatgtattcctgatgtcctgttactgtaatctttattttaaaaggttaacacagcaggtgcacacaccaccatatccgcccacaaacacacatgcccagaccagcattctttatgactgtgtggtaagattcccaatacggtgcattccttagagtttgacattcatacacttgctgtttagactgagaagtgatgcatgaaatatgaaaaagatgtggacatcgggaactagcaccacaatggtgagagacagccattttatacagagaagggttagtatctcatggggctatgaaggaaaaaaatcttaaacagtttgtaacgactggagagttaatcataagtttaccagatttaacaactcaaaatataatatacgccatttacattttaatttcagataaataagagctttcataaattgttgtcaaacactcatggacatatcgtaagatttgtgtgtttatgtgcgtgtgcttatttgaaatccaaattcagttgagcatcccacatgttgtctggcagtgctcccatctgttgtctggtagtgctccctcccagtcaggtatgaagatggccgttccagaggttgtgtcaatgcgcactcctctgtggactcctgtacagcatacagcgttccgtgtattcttatgcctcagtggaggaggaagggtagggggtggaggtaggggctgcctatcatttgttgactttgtcctgcgtgccaggacctcctagtattctggaattgctgtataattctcccaacagacctgtgagagggttctgtgtacacaaagcctcaggctcagaatcatggcttccttgtataaacccaacaaagtggcaaaggtaagattcaccagtaggcatttgtatgtgaaagtatgaacggtgaatttttaaaatatgttgtttacagtgcaaatatgattaatttctaattaaccatatttctaagtatggtaaggaaatcatgtcaggcacagttcatagaagaaaggcctttggttctcaccaccaaagacaaatctggtcagtttctgaactgttttttatatcgccaccgccaccatctctgcccatcaaccgtgtctctcctgaaatcctgcaaacgcttcctagctgctctatttctgttactgccttttactcacagagcgactttagaaatccacatcagcaaggttattctttgccttcccattgtacttgaaataagctcaagcttctaacaggcggcggcccttgctcggcgagcctgcccggcagccctcctctggctcccacggtcctcagccacagagcctagctgttgtcgctggcccctcacaagacggtcatatgctttccttccacttgcctcctccctttcgatgatggctggatccttcccaccttttccatgcactcagttggccctctcaccccttggcgtcgagatggtaatgctaagttctattctgttcattctctgagacggccttgcttataggacttcatcaaatgtcaaagttagacgctggctaatttagttcattagctctttttctcatcagatgataaactgaggttgcgaactgtctgttttattcactaggtgcttctaggtcaaaagtaccaagctggtgactacctcttgagagaacagatggatgcatggatggatgcatggatgcatggatggatgcatggatggatggatgcatggatggatggatggatggatggatggatggatggatggatgcatgcatgcatggatgcatggatgcatggatggatggatgaaatctgacagtgttctgtccctggcttcattatcagacacgagatcttcgatctgccatttagcatctcttactttatactttaacagtaggcttgacagtattggtctgtcagaagcattggaatttaatagcataataaaccaaaggtcttgccctacaatcctgttgattagtacagttggctcgtttgactgctggggagctttgccagtacctcatcctcacattcaaatgtgctcagttactgtttatcctcatattctccatctgagagacattaatgtcactactacctcatctacccatcttccctctctctctgcagtgtcccttcctgccccactacatgccttccatgggcattgttcctggtattctgttctcttgcgcacctgcaacaggacctagaaacaagatgtcgtttcttttcacgtatcattcctgttaagtcttgccatcagccatcatagaaaactctgcactctatctgtgagtgtgctcctgaacctttcctcgaattttttaaattaatgattctcccttctttgaaaacctgttttaagaaacttaatagaatttccatctgtggcatcttaactggatgcaactcatttttaagactggactcctttttacacttaaggagaaacaaaaagaacaatgaggtcagatctggggagatagttctgcagggaccagagttcattgtaaagtcaggcaggtgtggtcgcctgcctgaagtccgcgagggtagagggcagagacgagccagccagctagctagctacgctagagagatgctgccttaacagacaactgaaaagcaattggagaagacacttaatggagacttcttgcttccacatatacaaatgtttacagacaaaggaacaccacacacatgcaaaaaaaaaaaagaaaatgataggttttattcctctttcaacacttacaattccatgtaaagtaacaaataatttagtaggtttatttatgtcagaaggtcaacaatcttaagagctttctctaaagcaaaatttaaaaaaaaaatcaattccctggcttcccccgtgatcatgtgcatgtattagtagttttagatgtttgttgacggcgtgttaacagcatgcatattgcacacaccgcccttgggcacacccctcatggaaaatgtgcttcctcagcccatcagagacgctgggtgtggctggcactctgcagctgttcccttgcctgtgttgttcacataagccagccacctgcaaaccatagcaacctacttcgggttgttggtccagctgtgacatctaacactgtggttaactggctcattctattagcagtcccagagtcatctctgatgagtgttctgtacccaagcagccagaaagagctgcctagctgccctcctgattcatggacataattgctttgaattgcaacttactggttgttgatagcttattaagaggctaacagtattttgagtgaactggagcccccatcttttttggaagacttaagccaagaatgacccctctttccttcacgtttatttttagcaataaaggataatttattgtaattcaacaggttttaactgatggataactggcatatccagttatcctgccagggaatctaacaatgagaaaatataatctctgtccccaagaggctcaccatctgccctcggggagaaaggaaagaatgttatgatataagctaaagagagctgcccaaatgtgtgagcgaagacaagattcaaaacagtaaatgctcacatggggaggggtagtcggtaaaagatttaggaagaggaactggggaagaagggatagaatgttccttgaaaaagggtacagtacaaatgagtgggtaggtccgattgaatcagaaagtatatataaaacaaagccaaaacaaagctgtaccataggtcgggcgttggccgtccataatgcaattcacaaggtttgtcctgggcttagtagtcagaaggcaaatggagagaacttaggactgctagacctaggatggattaggaggcgatgataactggctagggagttattggaagtggaatagtgagtgactccaggagaggttatagagagagagagagagagagagagagagagagagagagagagagagagagaatagaagactcactaggtcctgacaagtgaagggatggaaggaagaatcaaagataaattcatggctttcaagccccataacgtaaagaaaccgtgccagctacagacagaatcgaccaattggatggaacaagtctttcttcttcccaaagcttcttggcctgcactagtgtcctccctggctttagtgcacccgtgcagagcccgtcagcaagaggaacccagctcagtgaagaagtgaagagctctctctgtacttatgctaagctgtcttctaatagagtttgggattgttcttacattcctgtgaactgcctctgccaacacaggaaaagaatgctgtcctttttctcttcaagaaggcagacacactcaaagtatagagtccaagctggttttgtttcccataaatgaattaactattttgactggagcaagtccatctgctaatatctcaccttgcctcccacttacacgcctgttgcgtttcagtttataaagctagcttagttgcatttgcaaagtgtaataatagatgtaaagtactttgaaaactcttaagaaagagctacggaaatgttaatatgattgttacttatgtcctaaagcttatctgtggagcatagaagtgctttaaaaatactttaaatatgcaatttgtacatttgagtatacttaaaatacttaaaattatacccgtaccttagacacaaaaattctttgtcttacaggatttcaaaataaatattgattcttttaaattttatatttatttttatatttaattttaatttcatatttaaggtgaattgtgaccatgagatttttctcattgtctctccacattaaaggttcttctagctttctactgagttttctggaatagagtcatgtaatttgtgaaatagctagtattttttaaatgtcaattaactaaaattgctctaattttctttttgagttttagagggggacctcgtgtagccagacccctgtgtctacttttgtgcagggtttcgggagtgcactatcccatccatccttatggtgatcttttttatttcagtttctatttagcatgactcagagcaactcgtaagaagtgaaaatgtgtttggggtgatatctgacacatatgcacacatatgggtggatggagcatacacaaaagtgcacatttcaatacttcactccagtttctataaggagaatatatgatggaactgtatgaacggcccagttaccccaagaaccgtccttaacccacaacccttttatctaagaaacgccaagatatgtctgatttgcaaagtttagcttctcagttgatctaccgtataagcaagctcatttgaaagtggtttccaggtgagcttttgtgactacttctcttctttgaatccaaaagatactttctaaccagcttgagatttttttttttcactcctggaaactagtgtatttagggattttccagattcactttaaaaataagttctcttctgactctctgcttcttctttctccagtaaacatgcacataaaaagagatgcacagggacacacagtccccttgggaatcccccagctgggatgggacacagatctgctttccgtttaagattctggttagcggcaggaggtgtgtctaggcaagctgaagttcttacagaaatcgaagggtgacacatataatatcgcccttacttctgcacagaggtaagagattagttaccacattcacagactgagactacagagaatggaacgtgtgctggtgtgtagttctgagctgcctcctcagcagagcacccatgatcttaaatccccttgccctctcttggcactccttccctgacaccctcgggggcgggggggggggggcaggcggggagatccctccctaaagtgggggtgactcttctgctgcctggacctcatttggttcacattgatggtcttgttggagttgcagttacaggggatttcattccctcctcccggtcacctgtcacacaaaccatccagtgtgtctgatcgtgagttagaaactcccgttgtctacatttggcttttgccaacccctactcccagccagaggtttaaaatagcttctcaggaaagacacacacacacatatggggagctatgggttcaataaaagagcccgtttccaaacctaagaggaaaagcagctatgggtgaagacatccatgttgacctctgtcctccacaggaacacgtgggtacttgcacctacgcatacattcgcacaacacacgcaactttggaaagaaagcagagcctgtttgctgcctatctgaaataccaacagggatgccaggggatgctctctggacttttctctttctagaatgtctcaggctgtgaggctgttctctctgccaagtgattagcctgtgctgtccgctaaaaggtcaagtcctcagaaaagagaaccacttccagtagatccagacacttccagcagtggccactgctgccgtgtggacgctcagagcaaatagcaggggataggcctgtcctctggagctcagcgtggctcctctgggaactcagtggctgagactgcgaacaacagccagaaccattagccacgccctgcttatcagtgtgcagttctttgctgtgtgctgctcttgtgtgtctggtaaatagggaagtgtcgttgagtcattgtgcaggtcctgggtgttcaggggtttcccctgagcgttacttacagtttggtggagatcaggggagggcccctttgtagtttaagaggtgaacagagtttatctgtaaaaaccttaaggaaaaggtctttctttttgtgctgccttgtggcttcaaaaccgaccgagtttggcaagatgttgagctgtctggggaaactacaaagagcactgggagaggctgaaaaggacttgacagataagcaatgccatccttggattaggcttttaattttccttaaatgtcctgtactggaacctaatgtctcccaaggtgtacggaatagagaacacagcctgtggggtttaaggcctcagaggacggactgtggtaagaagcagaaacacctgggggcctttaactgttttctttggcttttgctttccttcaggattggatctcacagtcgctaaacaggttttatgtcctccagtcctgtccttcctgactcctgaagtcctgagtttggaatcatctgatttcttctcatcttttctccttgtccatgaaaagcttcccaggaatatgcgtgtacccatttatcacaagtactgagttgtaaagaacagtcaaagccaaacactgaggtagggccatcttatggtacaggcgcgaccagaagaaagggggccattttccacatggaaaatcggtcacttttgtggaactggctccttgtcacacttaagaaaagaggagatccctccctctgcacttattctagactcacagctggcattctgcaaagcaagcgtctctcggtgagcaggtgctgtccttgggccacacattcatgagacactcagggcggtagagaggtagggcacactactgctggtagcctgtaaaaccctatgacgatgtcctgacgccatacactaagcagatctcacctgtgttttagctgctgctgctgtgtgggtcttggtgatgttgttcaagaccaggttgtcaaagtggttgaagcgagttaaagatcctttctctgtctcaagattaagtgggagtctggcatccccacgagcgaaggcaagctgttggataggccttgaggcagcttcagccctttttcttcagtggggattgtggaagtggtagtacgatagttagttatgtacagtgcttatatcccaagtacactttaaataagttaattacctttgttcactgggaactaaatatgtgaaagatgcatcagcaggattgttgttttgtcattcgtacaatatataaaataaacatgttacaatgttttttttaaaaaaaaaaaaacaatttaacctggaagccaagctaattacacaagttacggctatataaataacgtagtctaattacattcagccatgccttttagcatgtcacagggaaaacagcccatggctattccctcttcactgaatcctgtgggagatcccatcttcaaaatgtagctaacatgcaggaggaaaatcacatttaaaaaaaaaaataacccagtaacttattttagagcgagcactgtcattttaatcaaaggggaaaaatagctgcactttgtgcagaatggaaactcccagtgagcaaatcaaaaactaggataaagggctctggagaaagatttgagactctaaactccacgtttggaaggccctggagattcacaactgccgctgtaaagggacaggttgtgagtccctactgcactgggaagagcagcctcagagagctcgtattcctgtgaggcaagagcgccccccagagcctgcgcctctgagctgcaggccctcagccacctccgaggaagagctttgtttgtttgttttgattgtttctgaatgaaaaggaggttgggagtggggtgggccacgggaaagtctgtgaaagcttttggttgaaggctgtaaggcacaatgattaaggacagaaacaatagatttttgaaaactaagttgactttaatcatttcctctacacattcgttgctaaaaattagaataacacaagattgcctttcattgcaaatttcttaacatcagaaagtttaattatctactaaattattccagtctagccaaactacccaaaaattctatttataacatatcatttttgagatagggtctgtccttgtcgtcccatgtagcttcgaactttgaatcctcctgcctcagcctcttttaatattttgatacagagcatggacttatgttataaagatgctgtgcctttgcaaagaggtgactgaccggatgctgtgagctcctgtctctacactaacgacataggaggaggctaactgggatgcataaagcaacgacacctggtggccagcatattcttagggcagaaatggtgttaggtggcatagtgaaactattgccattgtcataagaattaaagttaaattcacgaaggtggccttggttcaagcacagggattcaagcctcactggctgggtactctgtcaaaataattaatattttgtagtagtaattgcttttggaattcaggaacttatcctaagttacccatcattcctgaagtctagagacaatagtaggataaatagcaatgtgatgtaagtttttttgtgatgcaaacttttgatgtgacattatttcaaagacttaattctaaacttttaattcgtgggttcagggcccttatatagcttattctgtacaaggcttccccctttttagcaaattagcgatataaaagaggtttgggttaatcttagagccagattttcaacagcgaaaacacaactgatggcactgtgtgctcctcccattccagtttgcatcctgattttgaagggggagacatgtacggttctttcaacgtagtaggcggggctgtgatcccaggctgtgtaagataaagccggtcctacacgatggtaaatcattcccaggtccccattcttaggtgtccgtcacagagtaaggtgtggggtcggtcacacgccttgtggcactgtggatcaggtttgctaaggtagagtgtttccccaagtgcttgtctccgaacccgtctccttatttgtaggacaaagttgtaagcatcgtattcttcgcaggatcgttcctatccataaaggtctttttagacaactttggactttccttcttttcgtcttcctgtaacccccacagatctctcctctatcagagttatcttatcttgacttcctgggctcacatcttccgcttgttttctgccatgtttctctaggttccgaagctgaagaaccagcaagcaagcagttggtgctcagctataatggctcaagatgactccattgtcttcccttagtgttggcttcttcctgtattctcaaaggtctagggcaaaggtttgagaccccctgggccactgccaaatatcacagctccttttggaaagtagccgcagccacagcctctatctactaagtaggccggatgcagagatatgcaccctcttcttcccggcatatttggagttgtttcaaagaacttacactcggtgcccagccgctcagcgctgggtgcagcctggcagagaaagcctcagtctggcagcaagagaggccaggctcacccttcctcagtttccccaaagtaggcaaagggaacaggatggattagctaaggagataaacagtcacccagtttatacagccaagctcaactgtgctcctgattccctgttaggaagatgtctcctgttaaaaaacctgtgtacaccagctcccaggatgggggaagacccctttgctctgcaaggaagaagtaaatgattacctaccctttctccgtgtccagcagccgccgctgattggtgaacatgcctttttactgtgcatttatacattgctaattttttttagggtgtaagagctaattctgtgtgccgagaggtcaccattgctcatgtttcctagtggttaagcctcatccgtctcctttacgtgatacctgctagagactgcatcgcaaacactaagcagcaaacacaccagttatttatagcagtgacggggctgtaagactgctttctctccatctctgtctctatctctcttctcctctcaagcaatccaatatggccttcagttccttccattcctaggggtttctgttttatttatttattgctttttttttggttggttggttttggttttggtttgtttggttggtttggtttgggttttttgagacaaggtttctctatgtggctgtcctggaattcacgctgtacatcaggctggcctcaagctgagattcacctgcctctgcctctgcctctgcctctgcctctgcctctgcctctgcctctgcctctgcctctgcctctgcctctgcctctgcctctgcctctgcctctgcctctgcctctgcctctgcctctgcgcctctgcctctgcgcctctgcctctgcgcctctgcctctgcgcctctgcctctgcgcctctgcctctgcgcctctgcctctgcgcctctgcctctgcgcctctgcctctgcgcctctgcctctgcgcctctgcctctgcctctgcctctgcctctgcctctgcctcctctgcctctgcctcctctgcctctgcctctgcctctgcctctgcctctgcctctgccctctgcctctgccctctgcctctgcctctgcctctgcctctgcctctgcctctgccctctgcctctgcctctgcctctgccctctgccctctgcctctgccctctgcctctgccctctgcctctgcctctgcctctgcctctgccctctgcctctgcctctgccctctgcctctgcctctgcctcctctgcctctgcctcctctgcctctgcctctgcctctgcagtgctgggctttaaggcaggaaccgccactacccagagaaacgtctatcttcttcctctgagtccacctttttgctttcatgtcgattctcaaacaccatggataacactgattagagtcagtaggcactgcgcagaagattcagagtcacggaatagctttccgtgggaatgggttgggcacacattgttcatagagacttccttgtgccatagattcataggagtttaaaagttaaggtggccaggaaatatccccatgttctttgctcattttgagcaccaagaatctccaaatgaccaccaaagtttaggtggctgccccaagagaatccagatctcctaggatctttcactacatcagccacccctcccccacacaacaaaagaaaagatgacaccagtctgtttgagggtagttttatgtgtggtatttgtggcacgatcacaaagcattttcaatgtaacagaatacttcggggaagggtaaggagcatggaggagcagtgaagaaggggagccagtgacaataaggggctccgtgggtaagagcacttcccaccacctgagcgttgatccttaggacccacacagtagagggaagagccaactcccacaaatggttctctgaccacacgtgcacgtgcttaagaacctccccacaacaccccacacacacgcacacacattacacacacaatacaaaagtaaaataaatgcaataatagtgttgtaaaagcattacgagattgtgcatagaggcgctacgagacctctaggtgctatcagtcctctaggctgatgtaagaaataagtttagggttttttttttttttttcaaacacaaaagcaaaggaagtatgaaatcaatcccaatctggctcttaaaactgggtataaaaagaaactcagctgaccaggagtggtagtgcacgcctttcatcccacacttgagaaacagaggcaggcgaatctctgtgagttcaaggccaatctggtctacagatagagttccaagatacccagagctgcagagagacacatttgtcttgaaaaaaatcccactcatatgtttaagaacttctacttaagcctaaattgaattattcaaactaaggagagaactgaaaggtactccaagagctaaggacctggcttaactgtcttgcaatgtctgtctcctagatcccagactcttagctgtgggtcacacacaggtcacataactaaatataggaactgtgaagaatttgacagaaacatcaaaaaagttctgtacatgcagtaaccaaaaaactaatttaaaatcagtcaatgcttaatgaggccaacgtgtttctggcaggcactgttctcctgttttgtgttgtgtgacgtcactgccggcttggttctagacacacagtatgtacagtgtgcagggcccacagagtctgcctggaactgctcagctctggtcagacactgtgatggatgatgacaatacatacgatgctttcttcatagaaacacaacagtttagctgcagaaaacaaagacagtacgtttctattaccattcctcaatgtgcgagcatgaaatttctgaacctttggattttgtcccaatatttgattttttttattctgtctcatgctgagagtgagcatgtggagacctgagctgagttcctaggaacaggaaagagaaacgcactgtttgaatttgagttgctcatgagtttcatgagaaaaagaagttcaatagatttctgctggggaagtaggatagaatttccaacagtctccaagttgcccacgcgcttccacccttcagtactgcatgagtgttcccagccttggcgcctgtaaaagcaatagaataggtgtggagtcgtgtgcttctcaccccgggaccggggaggcagatggatcccgggaatgaagaaagctgcatagcgacaccctgtgctgaagaacagaacagaacagactctaacaaggcaacagcctttgccatctcagcaagcctgagcaggagagcagggtgcttggcgttctcaccctggagactcccatgcagaactgaagggagcagtcagcccgacaacttggtccacatttagcgatctttggtttcctcttctagaaaatgtggctcagaaaactgtgaggaaaagttacagtgaggaacaaatgcaagacagagctcacgaggtggctctcacagcaggtagcaggtcccactggttagagcaggatggttaggggccatcatcttcttccccctgtgttgcagagcaggggctcttgcttgtggtgagccccctcctcctcaccgtgtcctggggcatgttgccctcatcctcaccgttcatcctaccgtcctctacagaggaggagcgccgaaaccttggagcaacacagagcccttcactccaacagaggataatgaaatgcttgcttttccgcattccagagatcaatctctaattcatgtcaaagggagtgaagaaaaatgcatcgtggatgtagggtttagtatttccgtaacactaagtgaacacgtcatagaaagaacacctctgtcatttctgaaaatctaactcgagaatcttgtcctgtaattcttttgactacagatctttgtaggctaacgtagcatctgatcaagagagctcatggtccctgccgagggtaagttgtcataaagcaggctaatttctctctgtctgcctcttggttactgctgttgctaagtggcaaggccgccctcctcatctcttgctgttcctttggcagcgttagcttctccggcatttttatatgttaccttcttaaatattttacggagcatgtttgactcgccctgacttcttttaagtgagtctattgatttaagttctatttgctggccaagtattgtttttgccgggcatacatttaattttaattgaaaaggtgtaattccatcttttccatcttgcatgcagaagcagttgtctgtgcagttggaaatccatcgacccagcacatttccccttataaagagcagtctgagaagagcgaattgcacagctgaccccgactccagttcctccctcagtgtgatactaggagcggagcccattgcctaagaacgtgaccccacctcccgatacatggttttactaaattgcccaagctggccttcatctcactccgtagccaagtcttagacatactgtcctcctgcctcggccttccagatatctgggattgcaagcctttggtcacccagtgtggttttctagctgactttttcaatagctgccttgccttcactgataaaatgtaattcctggcctctgcattctgatatatagtcagtgacagcagatatgctctgtagtggctgaccactctcttctgatcctgaactgtttttccaaggggaaaatacagggttgggctttgcaagcccctggtcacaacattttccggtatttaatttaattttatgtatgtagctgctttaaaacatcaacacacacgcacgcgcgtgcacacacacacacacacacacacacactccttctttgtgtactattgagtatttgatggaagccgtggctatggtgcagtaactcatgcttacacaaagcttatggaaaggggttttctccataaagcacagcatggtgtcattgggcttagaaatgctatgtagcatttgtcattacacttggagccattttaaacaacagaatcctcgacaaagagtataaaagggagagcagtgtggcagtaagtagtctacagtgaagacacgttttctgtacaaaagcagaaaccacaagagcatcatcttgtcagcctgtcaggcagctctcgactccatcatctgtgtggacagaggttaggtgtttaagacccactcgtagggtatttttatagttttaatattttaaatacttgttaatttatgccaaaataaaatctgacaatgacttatagaaatgtcaagaacaaaaaaagagcatacaaggaacaaataaattggcctattttagtagtagtggtagtagtagagtatgcctttatttcatcttttttccctctatcccacccacctttcctcattatcccccatctcctgttaaggatgcttcattgctaacatgggcttaggaaggaagctggaggcctgcctagctgtgctccccggaggtttctgccatcagggcataatggatggaatacaggcagatatctgcactgtttggaatatttattagatttttgtgctgccgtggtctctgttggttattctacctactcagagttcctgggtgctcagggctgtgaatgcagaggtccttgcaggtactgagtacatcagagttctggggtgctgagggccattttcaccctaaaggaaacagaaatctggtctgcttcagctacctcatttaagagaaaagctgtgttttatattttgactctctctctctctctctctctctctgtatgtgtgtgtgtgtgtgtgtgtgtgtgtgtgtgtgtgtgtgtggtttgttttaacctatgacaacaataagccttatgagtatctgtgctcctagaagattccaacagatagacattaacttctgaaagtggtacattgggacatccaaaggactcgaacaaattacctgtcattcttaagtttccgagattggaaaaaaaatgccactttatgtgttatagtgtttagggaaattataacttaggagacctggtgtttaacactgtgactgatgtcttcagtactgaggaagcctctaacttaatcttctttcacgaaggttttagtgtaaattaagagcacagagagctgtggctctctccccagtggtcctcagtgcctgccacaagcaagctagcatttgatggcttgaatgtgagaaaagcattcaggcagcagggcaccgagaagtcagttagatgcgtttttcatgaatgcggtccccttcattaccacaacgtgatgtctacttgtagccatttaaagaatcctcaaacgtccttacctgacatatacatacctgagcccactccaatcgcttcaagagtgtctaggatttctgaggcatatgcataaggtataattttcccaccgcaataagtactttatttctaacatgacgataattaaatacaattgcttgataatatttggagcgttatactggaatgcaagtgctggctttccagtttgggtttagagattagcaaaagttgggactggccccagggaatcatgtcttccagcagagctcttctgtctttgctgcccctctgtgcaggagtacagttatctttttttctcactaccctgatgcttagggaattccgtcctgtgtgctagatctatcacgttagtgcagctatctgcaagagttataaactagaaggacttagacagacagacagtttggattataaaagggaaaaaacaggcagaaacaaagggtgatataacaaaaggttataccctatgcagattttgtaaatctttgagctatcctactactaaattgagaacatatttttaacgtgccctcccttagaaaagatacgcgtccagcagggcctcctacagcgttaatagagcagtctgctctagtgaagtttacatgctggtactcattcttgggaaagtcttagtctgatgaaacagcatttgtgagaattgaggttttagggggttactgaatatgaaggctttagggggtacagaatatgaagctaccaagctggtgttctcgtcacttgtagatgttctaactggtgattttatttttaaaaactttgaaaaatagaaatttgcatatatttcatgatgtttttaaaaatctcctgtgactctacaactcccagtagttgtatttttgtttgtatgtttggtttttgtttgtttgtttgtttgtggatttggggaaacagggttttgtgtaaacaggactggactccaactccctttatcatggaagatgacctgaaatatttaattctcctgtctctgtcccaagtgctgggattacaggcatacgccaccactgccacttccaggtcctttccgttttttaaacagtgaagttaggtggcaactattaattcacaaataaattacaggacacggtttatgtgtctttaaatgtttgtcttggtttgtttcctcaagcactattttcttatctgtgtgcttgacattccactccctggacggccacatttcatttttctggtcctgtactttgggacatttggaaccgttcctaattcacctgggactcagtcttggcgtgcatccctagctatctcagtagaacagattcctaaccgagcagctaggccaagcagtgatgggcttcacttactttcctcactagtagttttcaactctggaggctctctcnnnnnnnnnnnnnnnnnnnnnnnnnnnnnnnnnnnnnnnnnnnnnnntctccctctccctccctcacccttcctccctccttctcgccctcctgctggccatcacatccagcttacatgttgcattgccatcatgcagaatgcacttgtctctccttttcccttattccttccttcctttttgataacaacctccttcacatattgacttatccatggttcaagtccaagttctttgaggacttcgaggagaaggtgaaagcccatggcccattgttccaagtggcagtggccctcgtgagatgttccgatgtgttaagtccttgggtttcctgggaggttttcggtgagctagaatgttttctagaatctcaggtttgagccttcctgctgtttgcattcttcaggatgagaatttacttacccctcagttcctagaacctgagtccatgcatggaatgagtgcttgatatgtagcatcaactcagtcttaatgacttgatttaagggagcattctgtaaaactactgcaccaatgtacaagaaaagaaagataggcagtagataagtaccctagtagagagtttacctaccgcacaacaaaccctggtgtggtaggacaagcctgtcatctcagcaattgaggcagttggatcagaagttcaaggccagcccgatttcggggtgaattggggaagggagaaagaagagtaaggactcgctcgcttaatgccagagaagaagtacactcatgatttcttgaaatagtatttttctcttcttttgtgcttactatttcatgtatgtcagttacagcacatgttaaatgaactaccgagatcccaacgctttcagtgacataggtcactaaacatggttaacatagttgtattagctgcagaagctgactggcctgtgagttaataaacgctagctggtgtataccatgggctcttctcggcatctgtaacccaaatttctcagtagagtcctgatgctgtgcatccttccttcttacgtcatttcataccctagctaggcatcacagagcctgcgctatgtgaccattctgtcgggagtatccagcaacaccaccctgaagttaccaccctaccctgtaagcgcctacctctttaccagtcattaacggagttgaagtgcgcttctggaaacacaagccctccatatggtggctgcgagttccttattgtaattagagcaccgagaaggcggagcgtcactccctgagcgaagaaatgtgaagcggaagatgactcaataaacatctgagggaatgtttgcaaagtgtgatctccaaatctgcgctgaacttcagctctcaacctgttctccgcacaactgtttgtaatggcttgcgcttggtgctatctaccactgtcgccactgaaggcttcatctaagcatagcccagtgaaactcattactgtatgcacctaccataagaccctgtgtttaataaacaaaataaaatgcaactcccgtctggatgtcaaaccaagaatagtctacttcacctgaacaatgggtttcttaaacatagatttgacaaggttttagtgctggaaaattctaaactgcagactcataagacatatctagagagtaagggtgcatccgctagcagaatgcaggctggctccttctgtggtgtgttctttgcgggcaataccccaaaactgttctggttggagcccttcacaccctgctaaacatcttatacattgtattcttctctgtctaccatcttttccttacccattccttctgtttttaatttcgggaatgttccattctctgtcttcgtgtgctgcctgaaatccttcatggagtgaggcaaagcctacattaattagctagctcgaagacgcaagccttccttcacatctgtgtgtggtccatagggtgtcaatcctttactcagcttagtggttgctgttttagctcaagtatattggtgtttgataagctggcatttctataaaattagaatatcatatgaaagctcatatgtgaaatgaagagtccaatatagctataaacatatggctcacactgtgaagtgttttttttttcttttcttttcttttctttcccaaagagttttgaagaaatatacaagaacatatgtcctggcctaggactcaatgccagatttttttctagactgtggtttgagatttcagatcattaactggacacatctgtctgagtatgtttttctttaaataaaagagaaaaacttggaaggcagctatcccaaaaaaatacagtttagcattcttagggtctttttaacatatttaatatcctcgacccttcaaacgaggcagaaatcctctacgctgtgtggcagtcattttttgttagtagctctgcattctttctgtaattttcctatttgccttataagcacgtatttgtaagtggttagtgaacttatggtctaagggaaagaactttaaagctagaactgaaggactcgttctttttgttgcttttttagacaattttatttatttatttatttttcaattttttttattagagattttcttcatttacatttcagatgctatcctataccctcctcccaccctgtttccctacccacccactcccacttcttgggcctggcattcccctgtactggggcatataaagtttgcagaaccaaggggcctctctttccagtgatggccgactaggccatcttttgatacatatgcagctagagtcaagagctccggggtactggttagttcatattgttgttccacctacagggttgcagaccccttcagctccttggatactttctctagatcctccattgggggtcctgtgttctatccaatagatgactgtgcgcatccactaatgtgtttgccaggccccggcatagcctcacaagacacagctatatcacggtcctttcagcaacgtgtagatacttcattcctccttagaatggggaacaaaacacccatggaaggagttacagagacaaagtttggagctaaaacaaaaggatggaccatccagagactaccccacccggggatcatcccataatcagccaccaaacgcagacactattgcacgtgaaggactcattttttttttttaaagatttatttattacatgtaagtacactgtagctgtcttcagacacaccagaagagggcgtcagatctcgttgcagatggttgtgaaccaccatgtggttgctgggatttgaactctggaccttcggaagagcagtcgggtgctcttacccactgagccatctcaccagcccgaaggactcattcttcttaaactcacttctgttgttaactttaactaagcaagtcatacaacctaacagcctcagttcctgtatgtagaaaatgcatgatttaaaacaatgtctccctgccttacaagagacttggatggaataatatgtgtgggagagctttggaaagagtgaaggctattagaaacacacttcctgtctgggagcaaatgaacagtgaactcgatagcagaaccaccagttatttggctcaaacatcatccaccctgcaagattattagcatcctcagattcttcaccgtgagttctaagagtcctttgggaatcctggacacgtacttggaactgttcgctctaagattccttgtgagcacttgagtctttactctgtgttcaataccgtgctgtctacccctctgcccagtcagtgtcctctgactctagcctgcgtgtctctgaggccacctgtctccatagcaaagaggcataaggtcaccgtgtttgttcatcaatccgctgtacaggtctctgtctcctatgtcttcttacacagtccgcaagcattccagtccgtagcttccgcctcctgtttggcttgctggacactttaactgcacagcaccagctgagatggagctgtgctcctcacgcttggaggtctctgatccaggctactacagggaacacaagctgtgttgtccaacgatgacatcacatctgactgctctttaggagctgtgagttctagccatgccgtgagtgtgttaaggaggactctggatggacagctgagggaaaaggaagggtgacgtcatggctaatggtgtagctgtatctcaccgactgtcacagagagaatggaaatgaatgcattcagagttttcctatttttcatggtatttattatcgggggctctgtgaaagaagggggaggcatgcgagctgtacctcatatgtggaagacagggtagttgttcagttggctctctccttccactttgacgctgcttctggggctcccttgtgccggctgcaccattgtgccagcctgcgtgccagtcagcagaagccacggtgttctgagccggcgactgctgctctaggccgtgcgtactgcacaaggctattgctgttattgcttcttctgtttctcttaacccgggattcagcctggaaaggttttaggaaacctgcttggctgaaacagtcccctctctgttaacccactgattgtttggtaataactcaccttttcagaatcctcagctggcctcagagcaagactctagtacccggaaccgatgcagtaacccaactggaaccagagcatttgtcttaaaccttgtgcgtgtgacagacagctgtcatttattgagtgagattgagctgatctgaggagccaagccaaaactgcacactggccataccttcatatttgccctgggttccaactgtgttactgtctaatgtgctcaatcaagaactgctgttaacagctgttttgctccatttcttagttttgacatgacaggtgatatacttgaaattttttccaagcacagccattaattctatggccgtcaacttgattttcaacctccccaaagaatgtaagatttcttattctccttgtcaataacatttgactcattaacaaagaaaaatacatggtgttccgtgactctgggaaagagtagacctgtaaacattttctgaaatcaaatcaacaaatatgtgttgagaattggcatgatcgtgacatgctgtttgggtagaaatgagcttagctttgctgatattttcattttgcagataataggctgagtgagttctattaccacagactgaattttgaccttcaagggaggactaactaataagaacattagggaaaagtaattagtgtctaacagcgaaggagaagggcaggagctcttcgtggatggaagctggagaaaatggttaggatagaaacaaactgtaactcgactccattgtatctggcccaaagaaagactgtagcatcaagaacgggcctgtctacatggaggctagaatgggggaccaaagaaaatgatctttgtaccccactgtctgtcttgtggagagcgaacctgagtcatcttgtaagtctgatcagctgcccttgctgtatccaaggaaaggtgtgtggacccttcagaattgtgacaccaaccactctaatagattccacacgggccaagtcatccgactttaggtagctttagtgctgactagattacaaaccttgaaagcttttttgttattatttcaaattagtatctcgtgttaactttttttctcaaaattactattttttaatttactatacatcccgattgcatcctccttcctgtccactcagtccctccttctcctctcccctccctccacctttccttcctccccagaaaaggggaggcctcccatggatatcgacccaccttagcatattcagttgcagtaggactgggtgcatcctcttcttctatggctaagcaaggcagcccagtttggggaaagatatccaaaagcaggcatcagagtcagatccagcccctgctcctgctgttaggagtcctgcatgaagacccagctgttcaagtgttacatatgtgctgagggcgtaggtccaacccaggcatgctcttggtttatatttctaatttaggtgacatttatagttctctaatgctaacattcatctatgcagaatgtgtttagaacctaccaagtgataccacctggagaggccatctctagctcgtctttctgcaacttcaccaatggccagagagaaactctccaagaggaagtagatagatggcttgctttactgatggagtagtgagactctaagcttaattccatggacacatgtatataatgagcttagatttagtgaaaatattaaggttaacatgctagatgtggtagttacttaaaaaaacaaatctttgcaactagctcaaacaagtaggtgaagagggcctgttggactgtctcatggacaccaaaatcacacaggccatgtgacagtcattggagatgcagagccaggggggagcaaatgaagaagtgaagccatgtgcttgtcaaacagtcatacactcatctccacttagcttttgctcttgtattctctatgaaaagcttttttctatgtcaaaactcttgccttgccatgcaagtataactagaaactaactaaagtcacccaagctcgaaatcaaaagtgaaagacttcattgtcctagctaggacaagtgttccctgatagtccattctgctggtccagagatgaactcctactcaggaattgtgttcttagacagaccatgttgtggctgccttctttttctttagatttattaatttgttatatgtaagtacactgtagctgtcttcagacactccagaagatggagtgagatctcattacagatggttgtgagccaccatgtgattgctgagatttgaactcaggaccttcagaagagcagacaatgcacttaacgactgagctatctctccagcccctggagtggctgctttaagtagacattctaaacagatttgagcatcatgttcccttcaaatgtagattctgcttgaagtaaaaatgcaatgaataaataaataatttgggcatagtatatggttttaaagtattagggaaaatagtattttttgtttcctcattatcaagaattagctgcatatttaaattttataattgacttctttaaagtgtattagatttactaagtcttctaaatgtcttatttttgaatttgaattggattaactctatgtgtgtatgcgtgtgtgtgtgtgtgtgtgtgtgtgtgtgtgtgtgtgtgtnnnnnnnnnnnnnnnnnnnntgcatttaagtcgaagtctcatcccttacccagagacactgaagaaaagggaagggatttgaggaacaatgttttccaaaaagaagacagcaagtttgtttctagaggcttgacactggtgtgagggaaggcccccatgatttagacttaaagactcaccctcactaaaggtcagcatagggctaagaaaagaagccaagggggctggagaggtggctcagcggttaagagcaccgactgctctgagttcaaatcccaataatgtggtggctcacaaccatccataatgagatcggatgccctcttctggtctgtctgaagacagctacagtgtacttacaatataataataaataaatctttaagagaagagaagagaagagaagagaagagaagagaagagaagagaagagaagagaagccaagcaatacctttgaaagaagacacaccctgtagaccaggtgactgtcacgcccagtttcatcagtttagcagggtcttctataaagtcttcacacctctttggacaacatacaaaaacattgcttgagtggtcgtgctcctgagtgacatagagaaggaactcttcgtcctctgcgatagcctgtaacttaaagtccaatacctgatcttgtgtttggccacaggagaagtagatggagcgatggtaagaatactgagccaggtttcaagatagaaatctgggagcgatactcacacacagggacgctcatacacagcagatgagaaacaaagctaggaacggtgcttgtgcacaaagatgagaaactcagctccgagatcagagcctactagagtcagcagctaagccaatgtacaaaattcgagcaggtgtgacttcgatgggaaacactgtgcatgatagtaatttagagaggaaagctgtagggacttgggaactaaaatatgatacaaattacaaaaaaatagaatagaataaaataaaataaggtggggctaatgtagctttggatggacttaggaaagagtagtacccagtttggagcattacctaatcttttccaggagccccactgataaaatgaatattcagagagcgatgatgagtaattgacattattgaaggttaagttctgtattttgtgtgtgtgtgtgtgtgtatgatgtgtgttaaggcgtagcacctatcatgtcctgaggcgctaactttgtaccatttcacccagagtgcatagaaatcatacacttgcataaaggcctctccctcccgcctgttgagcctgatgccccaggttgaatggggatagcgctcctttcattgaaaatagatattttagaatgctaagttaaattttccatctacattactaatatgttcagaaattgggaataagctccctttcgggtaggtttaagcatttctctcttcctttaattatttaaataagtagtatttttagagggaggcagaaaaagctccatacttatttttaaatggaggaaggtagttaataaaaaagccagtgtttctcaaattatgggcttgattcctgtgcctaaaaattcatcatgttagatttagacttcctaccgaattaacaaaagcgagtctaaagtcattccttattaaaataaagacttggagcgaacaatctagaaataagatgcagctcttaaagggcacaagttgagaagttgggtcacttccttacatgaatacagaagcacacacatgcaatactgcagattaatgaatgatagtacatgctaatcacagcagtttataacctaaaactgttaaattttttataatctatgtatatattatccatccgtgattcagttataaggtttttaaattattctattttaatcatgagtatgcgtgtgtgtgtgtgtgtgtgtgtgtgtgtgtgagaaagagagagagagagagagagagagagagagagggtgcccagggaaggccagagggcattagattcttagagggcattagattctttgaagatgcagttagaggagattgcgagccatccatgtgggtactaggaacgtaacttgcgtcctctggaaaagctgcaagccctcttaaccatggcaccacctcttgggccttatgacaaggtttgatatgaaagtacagatgataccagaactattgagacagtgcgcaagtaaaataattcatgtttcattttgagttttgcaatctactttgtaaattacagaggtcactataaaacttcagggggcatggagttgggtggctcagtgggtaggagcgcgtgttttacaagcatgacgacttaacttggaatccctggcattcattcatattctttgtttaaaaaaaaaatccaaccatgacattgtatgcatgtagccacaagcactttgttgcacattctggccaccaacatagctccaggctcaatgagacactcggtctcgaaggaatacagtagagagcgacagagcgggaatcctggtatcttccttggcctgcccaatgcacatagccacacgcacacaaacactttctgtcccagaagctactgtgcaaacatttcataggacagccaggatcactccatatcttctcatgtgaatatgactccttgtgaccagagcagttctccagtgtagctgagcctctcctgatgctagatgattgcaaagctctcgtggggtatgagatgctagggaacacagatgagccagaaacatggctaggcctatctacccgagcgtggcttttcattgcaatcggttttctttcctacacaagtaaccgttatccatggagactatagtcaagacccctaagtgacttcctggagcaggtaggactaatcctgtatttatactatgtctccttttaaacatgtgtttctatgattaaaagtagtatacatattaagtatcctaagagattaacaatcaataactgatcataaaataagttcccaagtgtgcctctcctgctatcttaactccgtagtactgtagtactgagctatgtttggccacaagtaactagaaactcagaaagcagaaatattcggataaagagagactactctattgcaaactttataccagtaaggtgagcatggtgcaaaatagggttttacctcagtatcatggatagctcattttcttccctttcatttgcatttattgcgtatggtggtcagcggtcaacttgtaggactcagttctctccttccatcttgtgggtgccagggatcgaactcagatcctcacacacagtagttggacacctttatccactgagccatcttgccagcccagggtgcctctctttacccagtaaagacattgtgtataagtacccagcatgccctatgctttcatttcttaccacagtaaaccagaaaagctgtcagagagctaagctttgtcaaggacctgcttatggcgaagggaagcctgtgatcagagaatgcaacctctggctgggcaggctccttagcttggggctcacacttcctccccacggtgtttctaagctgtagagtcactttgctctccagcatccagggccttaaggccatttctgaggtgctccctcctggctctaagtgagggcgccccatctccatgactacagtgaactctcttcatcagcttctgaggtactggtttcagtccatctttgtgctgctgtaagagatcacacagtgagtaattaaaaagacatgaaacttctcaaacttctgagagctgacaaagttcaagaccgaggggcaaacatctggcccttgctcaggcctctcttctcggggggaaaaggtttaagagcagaatcgatcctgtgcaaatgagaggaagcaaagggagggaggcaacctcatggttttgagaaacccactggcatgacagaatggacatgtttagtcaccccaaggcctgaccagcccccctctaacactcttgcctttcgggatcacatttgcaaccctcgagctctaaggagacattctgaccacaggacatcagcgctgcactgacttctgatgaccactggctccttccaggccacccttaccctgatggctcatcgtttccaccttggtcctcactggatcctgagcatttagaaggatgggttcctgtacaaggacatagaatagagtgaaatgcccatcaataagaaaaggattaaatcagttatggaatagcccattctggggagtattatacaacaaatggtttaaagctgagttcctacatgttcacacactcatgctccgccttctacctgagttccaggagcttaaccaggcctgctcagcaaatgcctttaccttctggtctgtctcacaggcccgagacttacacttccctgcttctgtagtttgtattgttgcccagaaagagcatgcggctcctcttgactttgctctaccctggctctggaatctttatcggaccctgatctgagattctccctgctaggaaagggcttccaacagctttatccctgctgttactgtttcaaactttttcgtccttcttccttccttccttccttcctccctccctccctccctcccttcctccctccttccttccttccttcctttctctctctctctctctatttttcttccttccttccttccttccttccttccttccttccttccttccttccttccttcctttctttctttctttctttctttctttctttctttctttctttctttctttctttctttctttctttctttctttcttgtaaccaaggatccatctttagttaatccaatagatgccctcagtattagaactgttctcattcactagtcagttttccaaagacccccatgtgtttctgattatcctgcttaacttttttctaaatatttttacctgtccaattagacaacagaataaatctcttgcacttaaagctcaagtttccaaaaggaaaataaagtgacatatgtgtcgtagaaaacagcccgctgacagctgcagtggtgtctttgtcatcctcagcacccattcggaagccagttcttttatcacacgatgtgctgataccgaggagctttatctaagagtcactttaaacaccagcttctttctttgatcttcagtttctgctgagatccaaagagcttcatactgtttccttagataaatcaataatatttaatccaatcgaaaaatacaagcccagggactctgaagctgagcgctatagattctttctaaacacacgcaatggacttttctttttgcagatgcaagtattggcactatgatgaaaacctgcttacttcaagcgttgtcattgtcttccataatgaaggatggtcaaccctcatgaggacagtccacagtgtaatcaaaaggacaccaaggaagtacttagcagaaatcgtgttaattgatgacttcagcaataaaggtaatggctatagacttgacatctgcgctagaaaataagtcaatcacaagtaacagaagtaaaatgtgttatcaaaataagttttgaaaatgagaagtatctactgatacgttactatgttgtcactctgccaagcactgtatgtgagtcatttgtttaatcctagcaagaacttttagaatactataattatctgttttatacaggagactcagagaccccatcaggcacagaggcagtaattaaccgttagatccaaatccatgagttcaagactttcttcttgctgtgccaattctgtggggctcgggtttcacagaaactgagttaaaggaataacctactgaaagactgaagaacagaatcatgtgtattttgcgctgcccctcaaagctccagccgtagtcttcaaactgaaatccacagccttcgttctgcacttgagcaacgatgcaaatactgactttgccctggtgatgcgagtgtatttgctgccttcctggttgctgtgatgaaagcaactcaagggggcagggaggggctattttggctctcagtttgagggttcattgagaaaaagaagggacataaatgtcagtgctcagtccacgttcctccttcgggcaaggacccaagtctgtgtggtggtgcctccagcatttagagactagatcccgccgagttatcctgttaaccatcatactgaacacatcttctacagttcattatattctctatttgatttaaaatattaaataaaaataaattatgagttgaggtgagcatgtgtggggactcctgtaccccagcctagccttgagctctttgtgtaacttggcatagccttacattcttgaatttctgaccttcctgtctctatctcccaggcgttgtaactacaacctgggtctcaactcagtcctcgttcctttttttttgttttgttttgttttttttttttgggtgcagcgaactttattgatggtattcaagagagtagggagggctccctaggcccctcctgttattatgggggtctgggatggaaattgtgagggagatgctcagtgttgggggccgagttgggatagggcctctctcttgctcagtgtccttgctggggtgggtggtccagggtttcttactccttggaggccatgtaggccatgaggtccaccaccctgttgctgtagccgtattcattgtcataccaggaaatgagcttgacaaagttgtcattaagagcaatgccagccccggcatcgaaggtggaagagtgggagttgctgttgaagtcgcaggagacaacctggtcctcagtgtagcccaagatgcccttcagtgggccctcagatgcctgcttcaccaccttcttgatgtcatcatacttggcaggtttctccaggcggcacgtcagatccacgacggacacattgggggtaggaacacggaaggccatgccagtgagcttcccgttcagctctgggatgaccttgcccacagccttggcagcaccagtggatgcagggatgatgttctgggcagccccacgaccatcacgccacagctttccagaggggccatccacagtcttctgggtggcagtgatggcatggactgtggtcatgagcccttccacaatgccaaagttgtcatggatgaccttggccaggggggctaagcagttggtggtgcagaatgcattgctgacaatcttgagtgagttgtcatatttctcgtggttcacacccatcacaaacatgggggcatcggcagaaggggcggagatgatgacccttttggctccacccttcaagtgggccccggccttctccatggtggtgaagacaccagtagactccacgacatactcagcaccggcctcaccccatttgatgttagtggggtctcgctcctggaagatcgtgatgggcttcccgttgatgacaagcttcccattctcggccttgactgtgccgttgaatttgccgtgggtggagtcatactggaacatgtagaccatgtagttgaggtcaatgaaggggtcgttgatggcaacaatctccactttgccactgcagatggcagccctggtgaccaggcacccaatacggccaaatccgttcacaccgaccttcaccattttgtctacgggacgaggctggcactgcacaagaagatgcggctgtctctggaacagggaggagcagagagcctttttttttttttttttttttttgattatcagatagtcttttattgaaatattttcttgttgctgggcactccactgcaccactgttgatgtcatctatgatgtggcagccatccacattgtaacccacagattgtgcagtacccaggatctccttgatagttccagaaagctctctagccaaagagtagtgtctcatctgctgggcaatgttgacagtctcatcaaaagtcatgttcccactgtgtttaactgcagaaagaaaacacagggccttttacagcttctgccctggcttctaagatcatgcatggctcatggtttcacgttacccatctctaggctgttcccatgctttcagcacagagtcacccacatgtaggacaaccctggggcttcctgtcagctcagcactgagtcctcgttcttttaaaggggaccgttacagtattcagacaaatattaggtcatcttggttcgacttggaaagagaggaatcaagtggtgattttctagaaactttaactttttaaagctaattttgggtaatttctttcaatacgttattgcaagctaaatatatattcttaattacagaaatgtagaaatgatgctctagccctagctactcagtcaacatgcaaatgaaaatgcagggtggctgtttcaatgcaaatctgtgtatttgtttacctatctatctatctatctatctatctatttatataactggtcacaaagcaattgaagttttggaactgactgaactgctcagttactcaataacaacaagatgtttactctttggcaaacaagctttccgcagaaggcatgactacccaagctgatgttagggttgaagagagaacccaagtaccatgaaaataccttccaggatagctttattcagcttccttccactaagctccattcagaactctccaagtctggacaaccgtttgctgcctctgtaaggacatagctagaatcctgatctgtacacatatgctagcactcgaaaaaataaaactatgacttatttcctccccctcatttcctgcagctgatagctgcaattgctaatcattttaatcactctagacatatatctttaatgtttaagctcaattaaatgtatttattagcttgggtatcttatcttggttgcagttttctatgacaaatgcctttgccaaaactatttatttttctgcaagaagaagcatttgaaaatagacttgagcaggctggagaggtggctcaatggctaagagcaccggctgctcttgcagaggactggggtttgattcccatgtgatggctcaccagcatctgtaactccagtcgcagttgagcctacaccctcctctggcctccaggaacacagaacacatgtcgtgcactcaagtgcagacaagcaaacactaatacacataaagtaataaataagaaaagaaaatatgcctttgagcgatactgttgacactacctccagtaatttttaagtgtatgaaaaaaaatccagatctacaaaactactttctaaacttgcctgtgttggtactgatggtaggcactttattattaatatttgaaatcattgttataaaaagaataggtattttaccatctgaaaatagctttttggcccccaaaaaggaacagaacctgaggtttggtctgtttgtgcctctgacttcctctgtctatctgtctgtctgtctgagcttctcatgctacagctctctgtggctccaagtctcacactcaggctggatctacataccgcacagtagacagaaacgtttagattcccctggagcacaagtccagaaggcctataattagtgttttctaatttcaagacaacactaagatctgttgctactagcttcagaaaaattgtagcatttgcttaataaggctcaagtaaaattcggcttgtactttgcctcaatagatgtagaaaattaaaccttgaagttagttttcttttttagagacaaaacataaaacctcttaaaggacccaaatactctccataaactttaggcttctggtaatgaacgcattctctcttagcaaggtttggggcctttacatagacctggctcctcccaacttttgtgcatcttcatctgagaccaacgtggcctcaggtgaacagccccgggtgcttagcaaaccctggtctgcagcagccagggtttgtcagggtctatcttaaaagtctgcagcaaccaattctttgctcggtcccaccttagagctctgcagcagccaaggacctccttggtcctccttagggtctgtagcatacaagggttttcccggtcccaccttagtggtccgcagcagccgaggttttctcggacccgctgcatcttgttcccagcagtctctgcttcttgactgatggactcacagcagccccagctgtgtacaggctccccagagacggacaagagagacgtccgaggaatacggatgagctcttaatgctttgctcccaagtgacccatgacctttccagacaagccagcgccaccaacagtcacaaacccagcctgacaaatgtgggctgtaagaaggcaatatttacctagaaagtggcaagggtatgtttgagccctaaattcagtctaccgcagtgtgaggtcacagagaagccatttgtcttgactgagagtcactcccttctgtacattagggtgtatttaaggtttgggctgaagtaacatgtcccaaggacagccccaatgggatcagaaagactttagagactaatagtgaagggctgaagcagggtctggggaaaaaagaaaagaggagaggacttacatttaaaaagaaagaaataacctattttgaaagggaaaagccaccaaacgttttagcaggaaaatacaattaaacttgaaattgtatttgtactactcttttaaagttggtgccaaaatatggggggggggggtgtcttaattctgaaaacccatatgaatgggtgtttttgttggtgataaactccttgatgtggttatgcacacctctaatattagtgcttcacaggtcaagggacaggatcaaagacccaagtctgagagctggagagaggttaagagactggctccgcagtttgatccccagcacccacacggctcacaaccacaaccgtttgtaactccagtcctaagggataaggtgctatcttcttgcctcctccatgtaccaggcacaccagtggggcacagacatacatgcaaagtaaacaccatacacatacaattttaaaacaatttcttaagagtccaggtccagcctcagctacataatgaatttgaggccagccttggctatatgacattctatctcaaaacaaacacattaaaaagcctcctaaaacaagcaaactactaaatatatggtccaacacacccattgtgcagctggctctcagctagatacagcaattttttttttggtggtttgtactgatgagccaaaattttatcaattttaggacaatttctgtgtcctcaggaagtgtctcagcaggatacaggagcttattctagctggtgagccaatttcctgggctcacaatgataaacaaaagctgttattttacagtgagaagccaaggtgcaaactttgccaattgtgcccggttttcacaacatagaattccctctactaagtcacaaacatatatgtatatgtaattataatgattataatttaattatacacatacttgtaatgctaagctacagacaaaaatgtgtcttttgattgctccgggccaacttggatggatcgacttgatcacagcaagacagcgattttctgtatctattatggttggagaaagatggcccagaaacaaaattttgagcagcccatagccttgtgcaaactccagggaaatagcatgaccttatcagtagactgagtatcttcagaaatcctgaacttttttcaactgcaaaatattatattttttctttttaattttttaaacctgacatgttaaacttttaatgattatccaatgttcacagggatgcttgataatgttttctttatgctacccaatcccccatagatacattaagcttaaaattaacttgaaacacattttgccttccttctttctttggtgtgacagcagaggaccaaacccagccctgggaactgcttctcacacatggtctaccgctgactggcacctccacccttaccttccatcttcattgatctcaccataggtctgacccatgtacaattagtgacggcacagcacagctctttgctgctgctggtttttacaatagcaaggaaatgtggtccaatctttgtttcttgagaggaaaaaaaatgtttctatgtaaaagtctataatgttggttgaattttttttaattcacagaacacttaaaagagaaactggatgagtatataaagctatggaatggcctcgtgaaggtatttcgaaatgagagaagagagggtttgattcaagctcggagcattggcgcacagaaggctaaactcggacaggtaggaagtatgcgctagtgcactgggtacagggtcagcactaacgttttggtaacggaaggatccagatacagtttggaatttttctttgttgttgttgttttttttaattgaaatgagaatgttgttttgaacgcataacttatatgtcaagattgacgaaagtgctaacttgtattagcatctaactttacaatgtgtgtgatgtttgctgtgccatatgtgaggagtgttttttcaccctgcctctcttttttaaggttttgatataccttgatgcccactgtgaggtggcagttaactggtatgctccacttgtagcccccatatctaaggacaggtaacgtcaccttgcttttttttttttctttcctagttgaaaagtaaaacctcgtcctagacggacaaacactattctcctctgtgaccccattccatctagtttgccagatgttgtgtgagaagtgttttccttgcactgtttgtttcccgggtggagctaggtggatgctttgggctgacccaaacgtagccagcctgtattggggagaagctaggtgtccccttgcagagctgtctccatcttctgttgagactttgacattaattgtctcttctaaacgggataaatgctctgaagacttgtcattaagccattgggtttcttccagctttgaaatgattacattagatggtaaagggtcaactcttccttgggtcaagtctctgggttcctatggaaacttcagggttgaggaatagagagctgtgccatggaaagataaccattaagtttacagacccatccgaaacaccatcatccctcgctccatcagtccctcgctccatcggtccctcgctccatcggtccctcgctccatcagtccctcgctccatcggtcccgtgctccatcggtcccttgctccatcggtccctcgctccaaaagcttttgcttcctccccagaatactgactatttcagaatctaggcaaaggcagcctattcttgtgttgaatggcacgggccagatgaagaacttggaagtctttgtcatcaggtttaaggtgaaggaaggcccatgataaacaccgtcacatgccgtctggcttcctcccacagcagccctgccaggtagacatgatcagccagccatactttaaaaatcggcactaaggcttaggaaaatacatgtgccacaagtccagtatttaacgaactggcagaccgatttctgggcatttttacatttcaccatttattttaaattgtgaatagcacgtgacaagaggaaggatacctgaccaggtggccaggtcactgtctccagggcaatgtggcagtctacccagcagcaagaaaggggctttccaggtttccgtgggaagctcgtgtgtcacaccgtggccctcctgtgagtttctgttcaggaaagaagtaagctcacttctagaattcccttctatcctaccaaggctctaagccccagagatttttttttctctgtgatctccattttgagaagcctagtctctgtcccttctgatatgatgagcagagaccaaggtcattgtgactgtgatggcagcttagcacccagctggttattcagtgccagcactttcctaaacccaactgcaaagcaagtatttttgtttttttaatccttcacattcttggttcattccttaaattcctcagtagatcctgaaaacacaacacagaacctgaggttttagttttgttcaagtggcttgttttaaaggagggaagaaaattaaataaaagcaggaaagatgtgttcataataactcctcccaaaggatcagaaaggaacgaagagctggaagaagctgttaagaacgtgctgtcagaggaagtgcatacacacttttatttttaataggggacacagagaaagcaaccgggagagagctcctgtttttttttttgtttgtttgtttgttttttttgttttgttttgtttttttttaggtattttcctcatttacatttccaatgctatcccaaaagtcccccatacccccccactcccctacccacccactcccactttttggccctggcgttcccctgttctggggcatataaagtttgcaagtccaatgggcctctctttccagtgatggcagactaagccatcttttgatacatatgcagctagagtcaagagccccggggtactggttagttcataatgttgttccacctatagggttgcagatccttttagctccctgggtactttctctagctactacattgggggccctgtgatccatccaatagctgactgtgagcatccacttatgtgtttgcgagagagctcttgtaaacaatacagaattagtacaggatagctgccactaatgccgcagttacaaggaggaagcgtctaataatctccgcagcatggcccttgtttggatagctaggatatccttccattctgcccttccgctaacacaggcttggccgtcccgagaccttattttactctctacccccattagacagtcgttttcctaatacagagtgcgaccaagacaggcggagcccgtgtagctaggcgtggtgacctagtcagtttggggttcttaaatgcgttttcattttctgtaaatgtttcagagctacatgtactgtgcctctaatagattacatagacgggaatgattattccattgaaccacagcaaggtggggatgaagatggttttgccagaggggcctgggactggagtatgctatggaaacgtatcccactaagccacaaggaaaaggccaaaagaaagcataaaactgagccttatcggtaaagagtattactttacttttttttatgttgaatgtttacctaagtcctctttttttttccttccctatgaactcgtgtaactatgtgggtccatacatgtttccatttgatcttgctgcatcatcaacacaacacagaaccatttgcactgtgccgattatagatgtcataagcggcaacacatatgaaattataccccaagggggtggtgatgaagatgggtatgcccgaggagcatgggactggagtatgctctggaaacgggtgcctctgacctctcgagagaagagactgagaaagacaaaaactgagccgtatcggtaatcactaagtcgcttacctacctcccccctttctctggttgctgctaacctattaaccctctggccctgctgaaacctccctgtaagaactggagctgtctgtcccctcagatcccgacagagcttttactccttgcagcctcagcgctttgatgaattcacattggctcctcgaacagctttcacccaaaacgcaagctccgctaatgtgaatctgtgaatcggactctttcattcgggaaacagaaatctgttcttatcaatgaagcctaagcaggaagggaagaaacaaccctttcctgctgtcctaggagaccaaacgacagagtgtattctgtacattcaaaccacataaactgtggacagctccagacttgcaagtggcccccttgaagtcttgggtgcagcattcaacggggaaggacacaccagcaagaggatgttgagttctcccccctttgttttgtatgctaaatctctgatactaattttgtatcagttaaatgtgatgaatacaaaaaaaaaacaaaaaaacccactttagaaaacgttgcatagaatcctttgttgcttggttctcaaaagattgcttgattaacagaaagctccatccccatgttggcttgtggctcttcaaacagaatgatcgacttcacgatctccttttgatcttctaattgaaacattttacaggctttcaaaaagaaaaaagtggcccccaaatgaaatgtgtggacatgtagcccatgtccacaagtgtttcctgtctgtctgtctgtctattgtctgttcctctcccgtggttctgcttccagtctgtctgtcccagtcacggtgctcagaatgtcagaactcatttggagcagtgcttccgtgttgtgggtttgggtatgttgtgatcaggacgctggatggcaaacatgaggaaatgaccaagcttttcctgggcgtcttccaaattgtcattcaaaatcgtaaggttcagaatagtcccggaacctgctgctgaccggtttgggctcacatgtcacctagaaggcaaagatgccaaccttggtttgtcccgcagttctgtaagaaggcatattttagaagtaagcttagggaaagttaagggggggtccctttaatcagcttccttgtggggatgataagccaccccttccgagtacggactgaggtgagtgggatgtgttggaagagtgcaaacgtaatgaaataatgttcaacggcagctaagcaaatatgtctgggaagtataaccagaatgtaccggcttagtgacttaagcagtgtattttaagaagaaagggcaaacaagcacaactctttcttgatgggactttccgtcagtcctaaaaaataggaacctgactcactgtctgctcgacatggggttgtcgactgtttactaagcaccggtcactattttagggaagagatggccttttcaaaatattaataactaaatgtgttcccagggagtttatacaatagtgagtggtacacaaatgacacacacacacaccttttcacggtggaaccagcgggacccaggaatagacggacattagtgtgaacaaggaatacagaatcctaaccatatccagttcctacagcttacaaatcatagtgcattaatcattgcttaatgctaagaaggaatgcctagaatacggtgacattattctgctatcatttgttcaatagtgggggtgacttgaccctgaaatgttatagactggtttttctccttctcctaaaatgcaccagacctaagatctgtcccagcaagcccatggggcacccttttgcacccccacctcctcctgtagtgcaagctgatgccccgtgtcctgatccttaggtcgctgctgtgttcccaactgcaaactctgaatgaaccacactgttcaacagtggtttataccattatctggcaaggccttgagctataaaatttaaaaatgacagactccttccctgatgtatagtttcattcatcccagaatgactcacaaatcactgagggagaagtcagcaggcaatgtccacatggttctgtgttttgggagagaaagagaaaattttatcttaatggcaggcttgtttaaatcaacaaaagaaccaaggtgccctctagcggcaaagcatcgcagtactctaaggacctacttcagaagttttggtaaattcgcccagggattgagcacgttcctttgtgaaggttttacagtttcttaatgtttggccatcagtctcgcgtcttctgtgcatccttacactgtgttcccaaaggctgtctgtctgttggtgacggggtgccagggcgttgtgtctaacagtcatcacatgcagtgtccttccttaggtctccagctatggcgggtggattgtttgccatagagaaggacttcttcttcgaactgggtctctatgatcctggtctccagatctggggtggtgaaaactttgaaatttcatacaaggtaacatttcactcaaacaaatgttcttttctaactagtttggggggttgtttgtttacttgggggagtgggacctgtctctctctgccacactggctgtcctggacttctttatgtagaccaggctgtctttgaactcaccaagatccatttgcctttgactcctaagtgctgggactaaaggcatatgccaccatcccctgcctcttgtttactatggggtacccaagttttctcactttcaaataaagctaatttggttggttgggtgggtgggtgggtgggtggttggttggttggttggttggttttaaagacaaggtttctctatgtagtcctgactgatctagaaccctctttgtagaccaggctggctacagccaaacttagaggtctgcctgcctctgcctcctgagtgctgagagtaagggtgtgagacaccaaggccagctggggccagttgggggtcgtgggaggtggtacttgtttgtttctaggaaaaatacataatgagtttctctaaattattaggaatgcctcaataaagcgtagctcttaggataaataaagtgattagttgtctgcagcgctcagcccggaattaggacccacaagcttccgaaatggaaatgccctgctcccagactgtttgctcaatggaaccttggattatagtagctttttgaaggggctgtatgttgaccgtctactgacataggacatggtgacagacacagtcacacagggaccaacctcctccctctgcagcggaggtgccgtcctgcttggtccaactctactgtggccctgtcccatcttcagagattcggggagggacagagattacagtttttcagatattcattccttcttgtcttaaatatcctgtgtgttagtattgtgagggttagactagggacaactaatctttcttccaaagaacttttaattgtcaaaaaacaacaacaacaaccaccttatagatcagaaatatttgaaaattataatgtagtgaatttattaaaaaaaaaaggcagaggcattcagttgatggtttaagaaaatgccaccacgatcaaggaagacttggagctggaaataagatgcttccataagcagagataaagggaggagagaggcgggcctcctaagtgtgtagaacaagggtaggggcaagggtctgagtgtgaagagcaagtgcggctgccgttaggtgaggtcaaggagtgtgatcagggaagccactaaagacaaagtgggccggagcagtcagagccatgctaaagagtctttagtgccacactaagagattccccgcctcttggtttgataagcaggtggcagccaacaaagacactaagcaaggaggtagagaacaggacccaaagctcagtaatcgcatgctataaataaggccagagttcactagagaggaggtcaaggttatgaagccagttaggaggtgattacagtaatcacccagctaggaaatagattagcatcggaaacaacaggtggtgttaagactgagtgagggtttgcattattttgaggttgtgtggagaaagggctcctggctctggaagaacacagggaggaactcgctaagagtaactcactgcttacctcacctcagccttccttgttgttacttgtgtttctaacgtaatggactattttagaatttgattagcttagaattcaatgtggacattaggtctaatttaaaattaacatttacagaacaaacttttcagtatttattttttgcatttccgatcactttcacagtatacgttctcccttgacagatctggcagtgcggtggcaaattgttatttgtgccttgttctcgtgttgggcacatctaccgtcttgagggctggcaaggaaaccccccacccctttacgttggctcctctccaactctgaaggtgaggtggtgttgtttttaaaaggagagaagggaagagaagtaaaatttacatactacaaggagtggaagtatttatgctgtataacaatatttgatacacatacactgtgaactggttaaaatccatttagtttatagactacctagcatgctacccaatgccttgttattgactgtagtaactaatgtacgagagatctccgcatcttgtttctcctgtgatagaagttttgtgtcttttgctcaaacatctcctccacaaccttcccactcccatcctgtggtacccagcgctgcactgtgttctgtacactggtttccttcacatccttcccgtgagtgagcacacacgtttctcttcccgtgcctagtttatttcactcaccataacgtcccgtgctttgtggaagatgatagactttccttttctctaaaggctgggcattctgttgggcatatcacgttttcattatccattcatcagttggcagaccacttaggttcatttcaaatattggtcattataaggaatgcttggaaattctgcacagaggttcaggcatctcattggtggactgaatcctcatctttaaggaatgtgcactataccggggttgctgggccacagtttttcctcttttaattttggaagttctcactaattctgtccaaacctgcaagttaaacgtttgtcagtgatgacaatgtccatttattttattggtcagtagctgccattcctctgtgttggccacctgtggaaggcatacagttaatttgcagttatagtaaaatgatttcattctagtcatgaaaagatagaccgagtcgcccgaggagcaattcttcataatgatgggtttgaggatgagattttctcctgtatgtgtcagtaacgtggtgctgatacaaaggaaggagatgagaataaaccccactgtccagccaggctctcaaaagccctgtctgggcttcacgttcttcatctgttcattgaatgaagaatagaatagaatgcatatcttagaatgtatgatctttcagctcaggaaggttggcttttatgtacactacttcttaattgagtctacatacgtgatatttttatacttggaaaataacatattagtggtatttatctcttattcccattgattaaatgtcacatcgtgactaatgagttcaatgtactttgtttgtattctgtacatctaaggtgggcggtttatgcctttacagttatttctgcatctcataatggctgcaatttttgtttctgcagaattatgttagagtcgtggaagtctggtgggatgaatataaagactacttctatgctagccgtcctgagtcaaaggcgctgccctacggggacatatctgagctgaagaaatttcgagaagatcacaactgcaaaagtttcaagtggtttatggaagaaatcgcttatgacatcactgcccactaccctttgccccccagaaatgtcgagtggggtgaagtaagtagcagccctgtattcagacatccagatgtgcgaatccagagtcagtgtttgaaagaaggcagagaaaaatggggaggcattcatggaagcagagaaggcttgcagaaatgtttagctgaaaccacactgagagcataccctctccttgtaccaaatcatcagagctgccctgaccacgagaccacaccccctcccagcctttgcacacttgactgtcagcaaattctcccccatttcctccgctccagcacccaccatgtccctctgtcattctgcctccttttccttccagtttcacttactgctcttgtctcggagatcataactactaaagatcatttctctgttctcctgcatcagagccccttaggtctgccaagtttctatgggttctcacgacgcttgcccaccttccaatacacagggcattggcacagcccttgtcaaaggtattgggcagtggtaataaagtgaggcagaggcattgatctgttacggccatttcctatttcttctgacttgcctctgtggcatcaattctgattgtgctcacgcttgtgccttatgccactgcatgcagctgccttacagataattgagcagactatcagctttcaagatcgtgtgtgtttgttaatttgtgcattcagcaaatattgatcactgccccggtgtgtaccagtcattcatctgggcaaaaatacagccccctttcttcaaagaatgtttatactgttcagggtagggggagagagagagagagaaggggagagtgagagaagagagaggggagagagagagaggagaaagaagagaggagggggannnnnnnnnnnnnnnnnnnngagggggagagggggggagacccaggaaagcaaagaacaagacaaaatggtaccagctccaaaggaaatgagtgtgaggtacagtcctgaggaggtcggaacggtaggatggcttttctggggatatgacattagatctgaaacctggatgataaagacctaagccagtcagagagccaaaaaaaagagagacagaaagtggtgacttcaaagataggaaattgcactcattacttatctgttgctgtgctaaaataacttgactgaggaaatccctgaaagaaagagtttatttgggcttacgatcctaaaggttaagagtccatcgaaatgggcaaaataaggaatggcagcaagcatggcggctggagtagcaagctggttgggagttcacatcctaaactgcaaggccaacgcagagacggagctggaaatgctgagtctttagactctcagaactcattgcctatgacatacttcctccaaggccacaccccttaagcctctccaaacagtgctacccactggggacagtgactgtggcttagaggaaggcagagcacaagacatagccaaggcaaacaccaagtcacagatattgtcagagaatgtgggtgcggagtatcagtgtgtgaaagatgagggctgggatgctttcgttttctatttgagcagctggttagggggcagctgaggcaggcgcacagtgggcagggaacgtggaggtgttgaggtgtagcactcttgggtctgtttgtggttcccacctgcaggatgacttctagacggcaggccgtgtgcagctgtcagctcctgttggttgaggatcttgtgccgaaccctagaaaagagacttctccagaaatcaacatctggagaccattagcatccagcgcagtgacattgcagccatagagaaagaaatagagacagagaagagaggactgaacccatctgtaagagtctgcagtgttgagagttggggtgtagaaagagaaacacagaggacactgcaactgctctttgacttcctgtaataatgcctgtgtctttccttggcaggcttattccatctctcctgttacagaaatctagccagtaacccgctgagaaaaacgtgaatctggggcagtccagaccagacttagttacgttttaatctcccagaaaccctctgtgtggaaggaaggaattctcctttgacctcagccaatcccctggctttaaactcatctttgtacaaatgacttttagatttgatcctcacctccagtctcctccctcccttcttccctctctcccttcctccctccctccctctcccccctctctatcagagcctaagcatattcattcagccatattcttgacttctttacttgaatatcatttccatctcagtccacctcaggtcaaatgccttttctccctctccagcccaccttggcccattgctcataccaaaaacgtgggggggtcttcactgagtggctttttctcacacatgcatcagtttcagaatctagcccttccttaccttggctaagtccccatcacctctcacccaaaccaactcacgcttatcattggcctgttctaaacaccggaaacaatcagagaggctttggaaatgcaatgcacgtcatgtcgccgctctttaagaaagagaggtcaccacaccagttgcttggttccatgaaggcagagccttttttggtgacctcaggactctcctccctctctcacctcacttgctcctgcttgcctctccctacttcaacactcttcctcccttctttctcctcctctccttctcctcctcttcctcctcctcacacttcttgcctctgctgaatgccttcctttgggcatctgcaggcacagctaacttccatgtctttcaagattttcctcctgtgtcctggatgagatctaccctagaacaccctcctcaactccccagcctcttccttaatggtcttgcttttctctcctgtggcctgtatttcttgcatgatagatatcttgttagcttctttttttgcctttgtgttgctgtgaactatgagttcgctggagcatataaatagatatatagatatataggcatatagatatagcatgcctgccatatagtagatacccacttattatttcatgaacgaaaacacatgcattgaggaatggatggatggatggaaggatggatggaaggatggatgaggggttggtttccctccttttaccatctctgtcctaattatatcttcagaggaatttgtccacattctgccatctaccccttacttcctttccattatcctttccattcatctgctgagcattccgaaataaaccccaatttaaaagatgtcccctgagaagtctgagcttccctgggcagtgtgtaggctgcttcatctgcacattcaactcctctttggacctcacacctgcttgtccccaagtggtggtggtccaggggactgtgacttgctcatctccatggactcaagagctcgtatcctcctcagaacccacagaatcagcactagatccgaatggtacagtgacctataattgagatgaagacaaaattcctctaaatgtgattattttagcacaaaattctatcccaaatgagcggaatggctatttgcttttgcctccatttaaccactccgtggtagttagaggagagccacactgtgtgccgttatccttgttctgagacaccttgagtcccctccccaagaagtgctgcccagccagtgagaggactgagaaagcagggtctgttccgtgtccagagcggctgtctgcccccagtgtacttacagagctcgcctctctgtgcctctcagtcacatggatgctaaaacagacctacaggttggtgatactagttacagcccggcaccacaacagccctgaactccgtgacagtacattgaacttggaagtctcacactcgggtgctggcttgttacaaaccatactgtttcctgtgtgttggttctcttcatcctttagatccgaggcctcgaaactgcatactgtattgatagcatggggaagacgaatggaggcttcgtggagctaggaccctgccacaggatgggtgggaaccaggtgagtccccttccttcagggctggtcagcactgagatccaccagactcactggtcacagacagacgagtttagtttgggtttgggttttggtttgcttgtttgttttgtttttaagatccatctacccatccatttgttatgcctgcatatatgcctgcatgccagaaaagggtgccaagacttccttatagatggttgtgcgccaccatgtggttgctgggaattgaactcaggacctaaagaagagcagtcagtgctcttagcctctgagccatcatctctctagccctttgtttggtttttaatttattaattttgacttaataaaaaatgttcagtaaagctaaaatatttcacttaaatagggaaatgtagaaatgtctgcacacaagtgataaaagtatgttcttgtgggaacatgggaacgtatactaatgatgactgagtaagcctaacccctaaaggtttgcaaatggggtttactaagtgaaattggtttacttccggtaccggtaggtattttacacaaatattattttacacatattctcttgcttcctaatgtagggattttcatatgtctaatttcagttgtgaaaaaactattaggcttgcttctagcttttaaattttttttttgttgttggtaatgataaatgtgttaattacccattctgtgtattagaggcttaaagaattaagagtgtaattcttatattgatagaagtcttcactaatctcagaatgacagtagttcttgtctgcagactagaggtctccaacatggacaaaaattatagaataagttattcaggttaattataggagttatatttcatccttttcataaaacatgtgttggcgagaaagacatctccattttgtttgttcaatagcttttccgaatcaatgaagcaaaccagctcatgcagtacgaccagtgtttgacaaaggggcctgatggatccaaagtcatgatcacacactgtaacctaaatgaatttaaggaatggcagtacttcaaggtatgccgtcgtccagctcccgggattgcctatgctgtcgcgttgtcaggaacaagtagccagtagaatttagatggataaatctgcagaccaagtgttcacatgtgtgacttggacttccagcgtgagttatttacacctgcttgcttgggtgaatcactgagctataatgaggtatcccttgtgttccctggagcagggacatcatgcagcgagaccaccgtgataggcatgaagagtcagtgccagtctcagaaactcgcgaatgctggtgttccaggaggccgctaccagcgccgttttcagatctaaatccaatgttaaaaatgtgaatgagtcaaggacaagcaacaaacttagaccattaaagaagaaagttcttgcctcttgctgtccagcaggtggcggtagagacaggcaaataagaaatggccgctgagccttcctgtttcttcaccttctgctgactggaataggggttggttgttttaaaggtcagatttattcacacgaccctgcagcccttggagctgcttttctgttagggctgtgcaggtttaaagctttctggcaagattgaccatgttaatggattaatgtataatttttttcctttgattgaattttctcatagattttttccccctcacataacatatcctgattatggtttcccctccctctgctcctcccagttcctcccacctcgcctcccgtccaaatctgcttcctttctgtctctcataagaaaacagacgggctgctaaggaatcataataaaacaaaacaggaactaacatatcagaacaggacaaaacaagcaaacagaagaaagagaccaaagggaggcacaggagtcagcgaccactcgtttgcacacccggaatgtataatcttcaaggtgtccgttgggacagaaccagtcagtttgtcttgttatgaactcaaacattagccaagccttgcaaactgaaaggctcggaagaaggcctccattctaatcatgtaatgtttgctctcccactcccgctctgaaggcattgttccttccttagaaaatattcccaggcgccatctcgtgcattctgagcacgtcaattgccgagttttatttttatgcactgtcactgtttgtgtcctgtgtgtgacatgcgtgaggagagagacactccggccctgtgccatgcacgcatgtcctgaggtcagaggacaactttgagcaacctgttctctcatccacctttatgtgggtctcagggatcgaacctgggtcaagaggctttgaaacaagcgtcttaacctgctgagttagctctcaagatccgaaaacaaattttaataacgagttggaaaagatattagagaatcctgacaggttgatagtgtttattttcacaaaagaaaatgaagaggaaccactggtagagacctgtgagaagagcaacttttaaagtagaaaagagtagcagtcatgagtggctttctggaggctgaagcaggaatgtgagttcaaggccagcctggactacatactgggaccctgggtcgctgactcttgtgatttcttgggtttccttctgtttgcttgtttggtccagtgttggttcatatatatatatatatatatatatatatattattatatgtaagtacactgtagctgtcttcagacacaccagaagagggcatcagatctcattacagatggttgtgagccaccgtgtggttgatgggatttgaactcaggacctttggaagagcagtcagtgctcttaaccattgagccatctctccagcccctggtgtgttggttcttgttttatcttactttattaccaccccttcgaagcctggctgttttctaatgagagacagacagggatcggatttggatgtgagaggaggtgggaggaactgggaggagcagagggacggggaaccgtaagtaagatactacataggaagaccacacgaatggatattggctggggatagaactcagaggtaccacatagtaatttaatcctcagtaccaacccccaaattaaaaaaaaaaaattaaaaactagaatctacatgttttaggtatttaagacactacacatttgttcatctccccagtgacagagtatgagggtgtggaagctatctaaaacatgctgttctataatgtatagatgaaaaaaagatgcagttaaaaataagcaaaaatgttttaagggagggaaaaagagaagaacgtaggtgattgtttctggtcagttttcagagagaaaaactagatgagcagaaatccagcattaagagtctcaggagaatctgaggaccgcactcaggttgtccctaatgtgagctgacattctgtgcagtcgccataggaaacagtggatgctgttaggaaagggattgtgacatacgggttgctgagaagatcattatgagccgagtctacagatttcctggcttcagcattcccccttaaatcttaagggtaattgaaactcactcagtactgttgtgctagcctggaatctcaaaactcgtgaggccaaggtaggaaggctgtgtatttgaaggcagcctatgcaacaaaattgagacccttaacagtaaaaagataaccaacactcttcccaaatagctctcatgtaggttgttattaagagtatttctgggattggaaattaaattgcaagaatttgtaacctttttaagtttcaaattatgctaaattaatacattatactattcactaagttataaagatctcccaaatgctgacatattccattgtacaatatatatttaaaaattagagccgggcgtggtgacgcacacctttaatcccagcactcgggaggcagaggcaggcggatttcttagttcgagccagcctggtctacagagtgagttacaggacagccagggctatacagagaaaccctgtctcgaaaaaaaaaatagaaatataaaacttgttttgttagaaaagtctttaaattgtgtaaagtcttcataatagtggtaaatttttcaaaattctgatttttgcttgaaaactagacagacagtgtcgagtatttttgggtttgtctgtgtgagtatcttacaccccccaccccactcccctaccctgctttattttggttatttatttatttatttattttccatttgtttgttcattttacatcctaatcactgccccctctctccccccagtgccccccccacagctcctcccagcctgcttttccttcccccttgggtatcaacctaccctggcacacctggccactgcaagacaaggtgcatcctctcccagtgaggccagacaaggcagcccagttaaggaaaggaatccacaggcaggcagcaggttcagggacagccccctcctccaggtgctacatggggttccttagtgacagacagtgtccaagtgtgaagaatcatagtctgttgacagtggatcaacaaagtaggtggtagcccttcctgagtctttctcagggcattgctgagtcctgccatgtggaagcactcggttcacacttttcatttcacctgagtggtttttaaaggatacaccatggtcccgttgtaactaaagatcaataagctccgatgggccaaagcctttaaccccagcactggggaggcagaggcaggagaatctctgagtttgaggccagcttggtctgcagaactagttcaaggacagccaaggggtacacagagaagcactgtcttgaacctggctccccatgcccaaaaaaggtcaatagcataatttaacaccatctttgtaggcatccttccatgaaagtgtggcttgtctcaggcgagtgctggtaggactgttggcagtttgccatccatccatccatccttgattgatgcccgaattcccatggtgactgcttttgttgcaatggtacatatgtcaattcaactcgaagggcagcaaattatctccactgcattttgaaaataagttttgcttagacacccaatcttgcatagtctgaggccctttctttgaagagccaagagctggattggagaaatcaacagcatatgatgaagaatgtattagagcaggagacagaggtgaaaaaacagaagtgagaaccactgaaagcgttagccgtagagaactggtatcccgtgaatgagcggggtgagtagcttccttaggactggaaagctggggttgtctttagccagactaagaacgagagacagaggcttggagggagagatactgaacttcaattagtgtgtattgagtttgacgtagttcaaatggcataaccaaaagaaagggctaagaatactgacattcaaggcgtgtgcaatgtgctcgaatcacctgctatggaagccgaataatggcacctcatagcagagatatcagagtccacacattattattattattatttaatcgtttcttacagtccaatcgttatcccccctcccagtctgccctccgacagttctcatccaattcctcctcctcctgtctccatgaggatgtccccaccctgaacccctgaggcctcaaatttcgtgaggggtaggttcctcttctttcactgaggacagaacaggcagtcctctgttgtatatgttttgggggcctcgtatcagctagtggatgctgcctggctggtggctcagaatctgagagatctcaagggtccaagtttgttaagactactggtcttcctatggggttgccctcttcagcttcttccagcttttccctcattcaaccaaccacaggggtccctggcttctgtccattggttgagcaaagtatctgcatttgactctttcagttgcttgttgggcctctcggagggcagccatgctaggcttctgtctataaacaccatagcatcagtaatagtgtcagactttggagcctccccttgagctggacatccagtttgggcctgtcgctgagcatccttttcctcaacctcctctccaattttgtccttgcagttcttttagacagaaacaattctgggtcagagttttgactgtgggatggcaaccccatcccttcacttgatgccctgtcttcctattggaggtaacagaatccacatttaacatttacttttgggctggagagatggctcagtggttaagagcactgactggtcttccagaggtcctgagttcaaatcccatggtggctcacgtccatctgtaatggaatgtgatgccctcttctggtgggtctgaagagtgcaatagtgtactcatacgcataaaatacataaataaataaatcttaaaaacaaaaaaaccttactttggctcactgtgttttgcagagcctgcacaggtttacgcacatcacttccggaaagtgcttagatcgatcggaggtcctgcatcaagtgttcatctccacctgtgactccagtaaaatgactcagaagtgggagatgaataacatccacagtgtttgacaagaacagaggaaaccaacaatctacctactgacaagtacatttatggaggactgaaaaccgcctggaacctgctgcaaccattattactaattttgtacagctccaaacctggaacctctctgatcagttggaaggggcattgataaactgtgattttacaataacattatcatctgcagtgactgtttacaaaactgctcttaccttaaactctagatgtttacatcgttttttgttttgttttatgatgatgttggtaatttgtgcctttaactcggtttcctgaaccgccgagttaaagcatgtgttgtcttctttgggaatacactcaggggtctggaaggcagtttggttttttttgttgttgatgatgttgttcttgttttttaacacacttgaaaaaaaaaaaaggttggagtaagcagactttcacatccgacttggtgatgatcaacctgctgtgtatttaattttacatctttcggaagcactgccacgggtcgttggccagggtggccttccttcagttacgctgctgtttgaaaggtgaatttcaacacatttagtgcctctttcatttctcagtatattgtttgagagcttctagtgacacttctatgatggtgacaatgaatgtcacctggggaacccgtctgttactcacaggagaatttcttggctatgaagtggaatgttgtatggctgggtcgaggacaacagtgggcccaactcaaggctgttccgtggggcttgaagattctgtggcattacctccctggcctctgttcacaccagcttctaggctagcaaaggagtccttcttctaaaaggaggggttggtttttgcccatctacattttgcatctgctttccccagtaccagtcatagaaaactaaacataattctcagtttgaaacttgaaggggggttgaggggcagggaaacaacacaataaagccctagtgtggacgccttaggttggtcctgaggtaaaaatccccaagcccttgtgagatggaagccttagagaaccacctcgaagcacaagctgtgcacagagataaactgacactttgtctacattcaaaggaaattccatgagcattctttttaatttaggaaaattagtatctaattttctattcttagatcttattatctaagaatacaaatcatcaacaaatgtggacgacattctgcgaagttagatgctagctctgtagggttccttaatttcttttttaagaagtataaattttttttatattccccagggaaaagaagatttaatttgaacatttattaatacaatacctactttaagagaaccaaatgttgaaaactttaatttctaggaagtctcttattacaccccccttcccccaagataaaatgtctacattgagtgccaaaaaaagaaaaagaaaagcaatgtggtgagctggggccagttaaacatttttgatcatgtaatcatggtatcgatgacagaaattcacaaactactgccagaaggaaatatttttaaatacagcttagggaaaagaagaaaaaaaaagcctgaatttttttttggaagaaaagcatacaattatttttcttccaaccttagttcatcaaatttgggcagtaaaaattcaacatcctgaacagttttatttataatcttgaattgtcaatttgtattttgctactgacctgtgatcaactatttaaactttcatctctagggatatttaaagaagaaatgcatttatatgcttatataattgcaaataaatccactgtagagaggaaactcggagaattggtaattatttgtgtgttagaaatggacaccatttttcatgttaaatagattttaacctcgtatctatgcataggctaaggtggcacatgaactgtgcatgtcatgttatgggtaaagtaaattgtttttacaattcgttaggatactatatgaacatgattctatatattgaaatcagaaacctttccacacatgaaagtatcagaagctgccaccataatgactattttgtacttcaggctgctttggaaataatccccatcgccttgctttgtaagttgataatatcactatgcatttctacacattttataaatttgatttatgcagattttgatacactgtatgtttctgtagaaattgtacaaatattcaaaattttattagggtaaactcaagaagcttatgtataacttaattctgggttgcttgttttttaggtgaggaaaaataaaatattgtattttaatccatagcttttcagtgcttgtaattatttctatatataattgcacacttactcgggtttttaagaagagcaagagccaaaaataaatatccagattacccacaaggaaaaaaattagccaggcttttcatttacagggtttatttagggttgatagctgaaataatgcaaactatagttattagagtgtgtgcctgagtgttgtttagaattctactgtatgtatttgtgtccacctgtagaatggaaacagattttcttttttttttaatgatttattttatgtatatgaatatacactatagctgtacagatagttgtgagccttcgtctagttgttgggaattgaatttaggacctctgctcgctccagccaaccccactcactctggtatacataagtacactgtagctgtcttcagatgcaccagaagagggtatcagatcccattacgggtggttgtgagccttttgaagcctttcaggttatttctaacacttggctacatcacccatcagatgataaagtataatctcagaaacgagtgtctttcttggcagtgactatttcaatagaattgcctattgatggccaaactatttttttaagatttatttattgtatatatatgagtacactgtagctatcttcagattgagggcatcagatcccattacagatggttgtgagccaccatgtggttggtgggatttgaactcaggacgtccagaagagcagtctgtgctctttcgcgctgagccacctctccagcccctggccaaactatttttaaatcaaggtaacacatcgacaaacagaagccaagagtggaagtctaccaaacaaaattataaatggtacgtagaactttgccaaacaaaccatttcaagagacaacagggatacagacgttcaaagtaagggcctgcataaagactatctcacagagaatatttttcatttctaaacagaatgtgattggatgtagtcctcgtaacagtgaggcatagtggtacatgtatctcctcccagcacttgggaagctgaggcaggtggatgtttgtggcagtgaaaagcaaggctggtgtctggccagagttagatacctagatgagcaaaagtttggtacatgaaaactagtccatatgtatgggtctttaaaagtattgagcaatgaaacaaccagatagaattactttggaaaacaatgtgatggtttctccgtttctacctcaagacctagctataccactcctgggcatatacacccaaaagatgctccactacctcagaaagacacctgctcaagtatgttatagcagctttattcgtcatagccagaaactggaaacagtctagatgtccttcaactgaagaatggataaagaaaatgtagtacatctacacaatggaaaactattcagctattaaaagcaaggacatcatgaagtttgcagttaaatggatggatcttgagaatatcatcctgagtgagataacccagaccccaaaggatatgcatggtatgtactcacttataagtaggtattagccataaaatacgggttacccatgtcatactccacggacccaaagatgctaaacaagcagaaaggctcgagaggggatgattgaatctcacttagaagggagaataaaataatcttacgaggcaaatggagggagggaactggatgggataggggatgaggagggagaggggggattcaggatcagatgtgaggaacggcaggagtgatggccagatggccatgagaatgaatgaaaatctgcaactgacagggatgggaaggtaggaggcatctctagggagagactgagacctgggattagggaggtacccaaaaatcaatgggggtgaccttagctgtgactcactacattggagatatggaacctgaagtggcagccttcttcggtagcgagggaggaaccccaatggagcggtgggaacaccaacccgtccacaaaatttttcacccaaatttatcctgtctgcaagaaatgcacggactagagatggaacagagactaaggaaatggtcaaccaataaccggcccaacttgagacccatcccacaggcaagcacctatccctgacactattaatgatagtccatctctgagaagctccacccagcagctgactcagatgcagacacacacagctaaacagtggatggagcttggggacgcttatggaagaacaggatgaaggattgcggcctctaaggggataggaagaggaccgatagagtcaactacctagactcttgaggctttcagagacagaatcaccaaccaaagcgcatacacaggctggagctaggtcccctgcacatatgtagcagatgtgcagtttggtcttcatgtgggtcccaaactggagcaaacctgttgcctggtcgtgggacatgttcttctagctgggctgccttgtctggcctcagtggaagaggatgtgcctaacctcacagagacttgatgtgccagagtgggcccccaacctgctcagaggagaaggggaggagggatagtgggagggggtgaccaagagagggcaggatataaagtgaaaagaaaaaagtaatttaaaaaaaaaaacagacagaagtttaaattgtttgtgaggactatttctaaataagatcaagaattgtaagccgggtggtggtggcgctcgcctttaatcccagcacttgggaggcagaagcaggcggatttctgaattcgaggccagcctggtctacagagttccaggacagccagggctattcagagaaaccctgtgtcaaaaaaaaaaaaaaaaaaaaaaaaaggaattttttgttttgtgataattctctttaagattttgaattgcaacttctcctgtcccagcagaagcctaggcggtcagagagagcgacggggatcatgttccgacacaagctcacagccctggattacctcaacacttcgggcttcaactgcaaagatgaaacagaatttagaaactgtattgtttggcttgaagaccagaaaatcagacactatgagatcgaagatagaggtaacttgagaaacatccccggtagtgactggcccaagttctttgaaaagtatctcagagatattaactgtcctttcaagactcggaatcggcaagaagcaattgactggcttgttggtttagctgttagacttgaacatgaagataacactgaaaactacaaggacttagtacctgataacaagaaaaatactgacaacgcagctaaaaatgcagagccactgatcaacttggatgtaaattatcctgactttaaggctggtgtcacagctctggctaacctccttcagattcagcgtcatgatgactacttggtaatgcttaaggcaattggcattttggcttaagaacatctaacacaggatgcagttgccaaagcaaatacaacaaaagaaggctgacctgttgctttagacaaacatattcttggctctgacaaaggcgatgcacttcttaatgaagctgctcagatccgtgcagttgctgcacatagaagagctctgagagctacagacaaacattaatgaagccacagtagcggttcaagccgtcattgctgatccaaagacagaccacagactggggaaggtagggagatgggcacatgtggatgtcggcttctctcctgcgtagtgatggggactgttacagtggcatgtgcttgggtcacacttcaagggagaatcccaggagattggccatgttctggagaattaccaccactgctttttttttttctttaataaaattgggggaagttaaaaaaaattttttttaaattgcctataattgagcttagtagattctgattgcttttaaatgactcaagcttagctttgagcagagttgcagcagggagcagcttaatttttatagtagtggatgttacaatctgtgcaaataaacggtagtataacatagtagtgtgagtgatttaagttctatagcacagcttccgcctttacagtacttgctttatagggtcttagggttgtcagtgtgcctaaagtcctaatataatgttctcagctcatgatcaaggtcattaacatgttactttctgattttgtgatttttttttttaaataagacttctagccaggcatggtggcgcatgcctttaatctcagcacttggaaggcagaggcaggtggatttctgagtttgaggccagcctggtctacaaagtgagttccaggacagccaaggctacacagagaaactctgtcttgggaaaaaaaaaaaaaaagacttctacagtgcagactccaaaaaagcagtgtgaatggaatatatatatatatatatatatatatgtatatactttatgtttccgatattatggcccatactttacaaatgaaatgaagttgagaagttaatgaaagttaatgaagctgcatgtgaaatgatgaccatggaagagaaattgttttatctgcatcattgttcaccatacaacctgtatagatgtgactctcagtggcaatttaaatgaagtcacacttgacttttgaggatgataactctagctttattaaggattaagtcccccaaataaaacttttaatagaaaatctgatgctcactggtattggatttaacctgtaatccctagcctttaaaatgacaaaatacatgggcaactcttatcgggaactgcacagcaggcaaagcaacctgccatatttttaaaaagagacaaggaagctggagagaagatggctcagcagttaagagcactggctgctcttccagagaacctaggctcaattcccagcacccacagctcacagctatctaactccagttccagggaatctggcaccctcagaatcttacatgcaggcaaaacaccaatgcatataagccgagagagagagagagagagagagagagagagagagagagagttgaatccatgtaccatgtctgtctatctgagagacaaagaatgaaggtcaagagtactaatatatatatatacatatatacatacatatatacatatatacatatatatatatatatatatatatatatatatatatatatatatatatatatatatgtatatatatatattgctgagctgaaaagacagtagaaatctgccattgcagcagaaaggaaataaaaactaaatgcccattagtagagtggataaaatatgacataatcatataatggttttatctttggttttgttttttcaaaccagtctcactagctagctctggctatcttggaactcacgagactggcctcaaactgacaagagatcacctgcctctgcttcccaagtgctgagatgaagggcatgcgcctccaaggagctgacaggatcatatactgttatggtatacaacgaaaagcatgaataaactagagttacattttaatggaaggccaaatcctaagggaatttatctatcactttttataattaccaaaagtaactaagatatacagcaagctgtacacatagagaagttaaattttttgtccatgctgactttcctgttggggttaagggttaaactcctgcacagcatggtatgctatctgagattgccctcaaacctactatgtatagaacaagatgaagtctgaactcccaattcttccgcacccagctcccaaaggccaggattaagtgtgtaatgtaccactacacctattctaaaatgttaccaagagaccaagaaccagttaagaatagagctgttctcaagtcgaagcccctatcacttttattttagtcttgtcccctgccccctttatattcgtactgtatgttgttaggttgcttgtataagccacctcatcttttttggtaatgtggaaagttaaagaatgcatatttatgattggaggaatgaatggttattgttacctgagctacagaacaactacaggctaggcatggtagcactttaatgcttaccacttaagaggcagactcttgaaaatgaagccaggctggcctacagtgcccagatcagcagggccaacatactgagacattgcctctgggaaggaaactggataggtgatataaaaccattttcacttttaaatttggtgaatcggtttgaaatttggtactattgggcacttcagttggtctttagtttttttctaattactgttttgtgtgtgctttctctgtatgtacatcacatgtgttcttggtgcctgccggaaccaagacagatcattaggtctcctggaacttacaattgtgagtcaccatgtgtatgctttctattgaactcaggtcccctgcaagaatagccagggctcttaacagctgagccatcgttccagcctgatttttcacttttaaaatgaacattcgaattgtgctatcctataggtgtgattaacatggaggacgaagctcaccaagagatgattgaggaggcccaggaacacaatgaggttcactgaacccgcacaaagtcttaactttgttgcagtataagaaccatcatagaaatgccaaatggtagctcttggataagaccgtatctacatttgttttgaccctagaatgtgaatgtattgtatgaggtttcagttttttataaacttaagatttgattctacttgaaaatttgtgagacctattaattttatatcatttctatccaacaagacagaataagtacccctcccatttatcttaatgtttgtttgaaatacgcataaaatattttgccaatcagacacaacagtataaagattgtaggcccggtgtggtggcgcacgcctttaatcccagcactcgggaggcagaggcaggtggatctctgagttctcgaggccagcctggtctacaaagtgagttccaggacagccagggctatacagagaaaccctgtctcgaaaaaaaaaaaaaaaaaaaattaaaaaaaaaaagattgtgtgcaggccctgaccactcatcacttccagccctttcccatctagcttgtgccctgtgcctctaacaaccaacaaataaatctctaaaaaggcattgccgctgggaatctcagggaaaactattctcaaacaggctcatttctagaagtattgtttcacctttaagactaagtcttataaaatgccctaacagttcctttattttgttattccctgagaaataaaaactgttttgtaaaacatttcatggtacatgaagtcatggaagtcaggtttttgttccttttttccccaagacagagtttctagatgtagtccaggctatactccatacccactctcctctacctaggacttaagacctgcaccagcacacccagctgggcaatcagatttaagatgctgtatttattcttatagtgatactcttgtgtgactgagcatacacaaacaggtcagaagccctcagttcattctgggacctgagctcagattctcaggcttgggcagcaggtgttactaggtacctgatgtgcaatgtccccaatcttcacttttctctttaaaaaaaaaaaacaaaggacagctggtattggtcttggctgagataggtttcctagggtcatgtaactacactcaaataaagctgttcatttaaaaacaaaggagccagggggtgttggtgcacgcctttaatcccagcacttaggaggcagaggcaggcggatttgagttcaaggccagcctggtctacaaagtgaactccaggccagagaaaccctgtctcaaaaaaaaaacaaaaaccaaaaaaaaaaaaaagacaaaggaaaaagtaaccccaaaaagtgccgttttcctgatatacaactatctccataaaaacatagaacaagacaaaaagatcaaagcaaaacagaacatccttaagtataaaaaaatattgttttagaatatgatacacgtgagatatacatcagaataacaaagactgaaatttgaaaaccattacttcgatcaaatgggaactacaaaactgctagtatggttagtgtagactatatactattacttagtgtagctttctaacaaacttcaagtacaggtttgggagaaaatagcaaaggcattcaagtgagctcagaggtacagcacttgcctggcatgcataaggctctgggttctatctccagcattgtcagaaacaaaaagtaaaggtttaagccaggcagtggtggtgcacgcctttaaacccagcacttgggaggcagaggcaggcggataactgagttcgaggccagcctgatctaggacagccagggctatacagagaaaccatctcaaaataaataaataaaataaaatttaaataaaaataaaggtttagattattctaagtagcaaattctgtattatctataccttttagctgttattccttctaggacttttttcacatataaatagtcacaggaatattcttaaaagttgggtaggctgctatcaagaaagacagtgatgccaagaacttctgtgtagccttggccatcttagaactctgtagacaggctggcctcaggaaatctgttgagatttttagggaactagttaaattacaacctattcaacatgagaagatgcagacatttaacaaagtcagtgctctaagaattcatttgtgtaatacttatgtcataaatatatgattatgctcattcttgatttgttagtagttttgaaaaatccaaagttgaaaagggatgtaactatctgatatatatatataatttccttaacattttaaataccattgaagcatgtactttggtggtggtgtcctaactccaaccctcctgccctctctctaccttccactctgggattgcatgtacctgccaccacacccagcctggtataactactttcaacatctacacaagtttcccaacacatttaactcacctcatctcgtaacttccaattttggtacaagctaagacttataagctaagacctgtccatatctcacatccatactgataaaaaagtgaatcaaaataattaaatccccacacctgggtatctagtacattatccaaaatattttagtatactaaactacccaaagcctaaaaatttaaaagatcataccccgactccaaatttgagtggataatcttttagacttactatttgtacaatcacagaacttttaaagtttttttaagtctatttgctctggaaatcaaggcagtatgtccttaacactttaacctgttgctaatatgttagcttgtggtcattaaaagaaattggcccttctaaccacaaaaatcagagaagcaaattagtaaatggttaacacaaaacttaactgtgtaaaaagactaacatgcctgtatctgtttaaggaaaaattaatacaaacacaatgcaaattaatatacattattttattacaaatttaaaaaaaaacaaaaaaatgcaacatcctaaaaaaaatttttactggtaatacaaattcctatgaagttttttttttgctagcataagaaattaaagaaaccattaaatatttagaaacattcaacatcaaaagctttaaatctaactgtagttgtagcccctgaaaaagctacaaactattcttaaaaagtattttctctacaaagaatctcatcagctatacaaaaatctgtacagtttttatactgaagctaatgttgagctgcacttgaatttcacattcttagcaaaataattgcctgagcaaatatactccacactttaggacagccacttattcttcatcctcctcttcttcctcgtcatcttcctcctcttcctcctcttcttcctcctcctcatcttctggttcgttcttcttctttgagcctgttggcctaccaggacccttctttcctgcttcacttttgcccttggcacggtatgcagcaatatcctgaaacattgtcaaagtaagatcagcatccgataccact

SEQ ID NO: 1045 - DNA, 4138 bp, Mus musculus
ataggaagacagagatgtcaataaccccttgcctaaccgaggaggcaatggactagctcctggagatgacagattcaaacctgtggtaccatggcctcatgttgaaggagtagaagtggacttagagtctattagaagaaaaaacaaagccaaaaatgaacaggagcgccatgctggaggagattcccagagagacgtaatgcagaggcagtaccttacatttaagcctcagaccttcacctaccgtgatcctgtgctacgcccaggggtcctcgggaactttgaacccaaagaacccgagcctcacggagtggttggtggccctggagagaaagccaagccattggttctgggaccagaatacaaacaagcagttcaagccagcattaaggagtttggatttaacatggtggcaagtgacatgatctcactggaccgcagcgtcaatgacttacgccaagaagaatgcaagtattggcactatgatgaaaacctgcttacttcaagcgttgtcattgtcttccataatgaaggatggtcaaccctcatgaggacagtccacagtgtaatcaaaaggacaccaaggaagtacttagcagaaatcgtgttaattgatgacttcagcaataaagaacacttaaaagagaaactggatgagtatataaagctatggaatggcctcgtgaaggtatttcgaaatgagagaagagagggtttgattcaagctcggagcattggcgcacagaaggctaaactcggacaggttttgatataccttgatgcccactgtgaggtggcagttaactggtatgctccacttgtagcccccatatctaaggacagaaccatttgcactgtgccgattatagatgtcataagcggcaacacatatgaaattataccccaagggggtggtgatgaagatgggtatgcccgaggagcatgggactggagtatgctctggaaacgggtgcctctgacctctcgagagaagagactgagaaagacaaaaactgagccgtatcggtctccagctatggcgggtggattgtttgccatagagaaggacttcttcttcgaactgggtctctatgatcctggtctccagatctggggtggtgaaaactttgaaatttcatacaagatctggcagtgcggtggcaaattgttatttgtgccttgttctcgtgttgggcacatctaccgtcttgagggctggcaaggaaaccccccacccctttacgttggctcctctccaactctgaagaattatgttagagtcgtggaagtctggtgggatgaatataaagactacttctatgctagccgtcctgagtcaaaggcgctgccctacggggacatatctgagctgaagaaatttcgagaagatcacaactgcaaaagtttcaagtggtttatggaagaaatcgcttatgacatcactgcccactaccctttgccccccagaaatgtcgagtggggtgaaatccgaggcctcgaaactgcatactgtattgatagcatggggaagacgaatggaggcttcgtggagctaggaccctgccacaggatgggtgggaaccagcttttccgaatcaatgaagcaaaccagctcatgcagtacgaccagtgtttgacaaaggggcctgatggatccaaagtcatgatcacacactgtaacctaaatgaatttaaggaatggcagtacttcaagagcctgcacaggtttacgcacatcacttccggaaagtgcttagatcgatcggaggtcctgcatcaagtgttcatctccacctgtgactccagtaaaatgactcagaagtgggagatgaataacatccacagtgtttgacaagaacagaggaaaccaacaatctacctactgacaagtacatttatggaggactgaaaaccgcctggaacctgctgcaaccattattactaattttgtacagctccaaacctggaacctctctgatcagttggaaggggcattgataaactgtgattttacaataacattatcatctgcagtgactgtttacaaaactgctcttaccttaaactctagatgtttacatcgttttttgttttgttttatgatgatgttggtaatttgtgcctttaactcggtttcctgaaccgccgagttaaagcatgtgttgtcttctttgggaatacactcaggggtctggaaggcagtttggttttttttgttgttgatgatgttgttcttgttttttaacacacttgaaaaaaaaaaaaggttggagtaagcagactttcacatccgacttggtgatgatcaacctgctgtgtatttaattttacatctttcggaagcactgccacgggtcgttggccagggtggccttccttcagttacgctgctgtttgaaaggtgaatttcaacacatttagtgcctctttcatttctcagtatattgtttgagagcttctagtgacacttctatgatggtgacaatgaatgtcacctggggaacccgtctgttactcacaggagaatttcttggctatgaagtggaatgttgtatggctgggtcgaggacaacagtgggcccaactcaaggctgttccgtggggcttgaagattctgtggcattacctccctggcctctgttcacaccagcttctaggctagcaaaggagtccttcttctaaaaggaggggttggtttttgcccatctacattttgcatctgctttccccagtaccagtcatagaaaactaaacataattctcagtttgaaacttgaaggggggttgaggggcagggaaacaacacaataaagccctagtgtggacgccttaggttggtcctgaggtaaaaatccccaagcccttgtgagatggaagccttagagaaccacctcgaagcacaagctgtgcacagagataaactgacactttgtctacattcaaaggaaattccatgagcattctttttaatttaggaaaattagtatctaattttctattcttagatcttattatctaagaatacaaatcatcaacaaatgtggacgacattctgcgaagttagatgctagctctgtagggttccttaatttcttttttaagaagtataaattttttttatattccccagggaaaagaagatttaatttgaacatttattaatacaatacctactttaagagaaccaaatgttgaaaactttaatttctaggaagtctcttattacaccccccttcccccaagataaaatgtctacattgagtgccaaaaaaagaaaaagaaaagcaatgtggtgagctggggccagttaaacatttttgatcatgtaatcatggtatcgatgacagaaattcacaaactactgccagaaggaaatatttttaaatacagcttagggaaaagaagaaaaaaaaagcctgaatttttttttggaagaaaagcatacaattatttttcttccaaccttagttcatcaaatttgggcagtaaaaattcaacatcctgaacagttttatttataatcttgaattgtcaatttgtattttgctactgacctgtgatcaactatttaaactttcatctctagggatatttaaagaagaaatgcatttatatgcttatataattgcaaataaatccactgtagagaggaaactcggagaattggtaattatttgtgtgttagaaatggacaccatttttcatgttaaatagattttaacctcgtatctatgcataggctaaggtggcacatgaactgtgcatgtcatgttatgggtaaagtaaattgtttttacaattcgttaggatactatatgaacatgattctatatattgaaatcagaaacctttccacacatgaaagtatcagaagctgccaccataatgactattttgtacttcaggctgctttggaaataatccccatcgccttgctttgtaagttgataatatcactatgcatttctacacattttataaatttgatttatgcagattttgatacactgtatgtttctgtagaaattgtacaaatattcaaaattttattagggtaaactcaagaagcttatgtataacttaattctgggttgcttgttttttaggtgaggaaaaataaaatattgtattttaatcc

SEQ ID NO: 1046 - protein, 609 aa, Mus musculus
EDRDVNNPLPNRGGNGLAPGDDRFKPVVPWPHVEGVEVDLESIRRKNKAKNEQERHAGGDSQRDVMQRQYLTFKPQTFYDPVLRPGVLGNFEPKEPEPHGVVGGPGEKAKPLVLGPEYKQAVQASIKEFGFNMVASDMISLDRSVNDLRQEECKYWHYDENLLTSSVVIVFHNEGWSTLMRTVHSVIKRTPRKYLAEIVLIDDFSNKEHLKEKLDEYIKLWNGLVKVFRNERREGLIQARSIGAQKAKLGQVLIYLDAHCEVAVNWYAPLVAPISKDRTICTVPIIDVISGNTYEIIPQGGGDEDGYRAWDWSMLWKRVPLTSREKRLRKTKTEPYRSPAMAGGLFAIEKDFFFELGDPGLQIWGGENFEISYKIWQCGGKLLFVPCSRVGHIYRLEGWQGNPPPLYVGSSPTLKNYVRVVEVWWDEYKDYFYASRPESKALPYGDISELKKFREDHNCKSFKWFMEEIAYDITAHYPLPPRNVEWGEIRGLETAYCIDSMGKTNGGFVELGPCHRMGGNQLFRINEANQLMQYDQCLTKGPDGSKVMITHCNLNEFKEWQYFKSLHRFTHITSGKCLDRSEVLHQVFISTCDSSKMTQKWEMNNIHSV

SEQ ID NO: 1047 - DNA, 175203 bp, Homo sapiens
  misc_feature (1)...(175203): n = A,T,C or G
ttttagtagagatgggtttcaccatgttggccaggctggtcttgaactcctgaccttgtgatccacctgcctcggcctcccaaagtgttgggattacaggtgtaagccaccgcgcccagcctatattttcaaaggcaacaacctgtatttagaaattaaatctcctatgcaacactggcagtttaggggccaggacaactgatctcacaaaaacaactaaaaatgccaggtaaaatatttttaaatctttttaaggccgggtgcaatggctcatgcctgtaatcccagcattttgggaggccgaggtgggcagatcatgaggtcaggagttcgagaccagcctggccaaaatggtgaaaccccgcctctactaaaaatacaaaattagccgggcatgatggagcatgcctgtaatcccagctacttgggaggctgaggcaggagaatcacttgaacccggaaggcagaggttgcagtgagctgagatcgcgccattgcactccagcctgggtgacaatagtgaaattccatctcaaaaaaaaaaaaaggaaaagaaaatattatattatttgatacatgaaaatctaaacaaagatgtttaacaaaatgccaactaatcgcttgcacagtttatttaaataatgtgtgatgccagagcatttcgagtttgctttacatgttattaatttaactacttatagagagccaggaaccaaaacaacaagcctaattagttggaatcataatagctgaagaataatcaaaatatatccccattctgacatattctacccacctctactgttacaaacctactctatgctatcacaatggcctcctaactgatacttgcttttatctttttcttttccaaaccaaacccagaagccagaggctgtgatcctatttagatgtaagttagatgacaccacctctgcaccaaactctccgatggcttcccctgtcactctaaataagtgccacagtctttactatgatctaatgctctcccttcactttcttagctacagctgtccttatgtccttgcttttcctcaaacaagcaggaacattcttgcctcaaggcctcacatttgctgctccttgtgcttggagccatctcccttcagatacccatttggctgtgccctcatctccaggtcttgttcacatattatcttctcagactgtgtaaaatggaatcctcccctcacccctctccagcattccacattccatttccctggcttatttctctccattgcatttatcttctaacatgctatctaaatgaatgagttaatctttgtatactcttagaataaggcttggcacatggtgatacagcagtttattcaataacagtatgtaataatatacatatttggcttattgtctgactctatggggacaaggattttggcttttagtttactgctgtatttccagcatctagaacaatgaatagcacgtgacacaagctcaaaaaatgttgaatagaaatatctaaaaatatacaagaaaagattatacaaaaggatgccatttgttaaaaataattttatatggtttgaaaaaagaagttatcccacaaaaccaagtcctcaaagatcactctccaaaaaagaaatgtaattaaaattcaaatttcataactctttgcagtatgataaaaggtacatttacctaaatggcagtattttgagctcccctgaagatcagcactcttagctcacaactctgttgtggctctccaaatagtcatttaatacagagccacatgttcaaataaaagagaaaatgtacttgtcattgttcagttgttacaaactaaagaaaggatgaaatttctggacattagcaagatggcatagttgggaagtaaaaggtttggaattaacagatctctagtccctgtccagcctcttaattcctggatcatttgggagaatctctcgcatcatctctctgtagtctgaacctcagttcctttatttgtgtgtaactgtttatgtctcaaatgcctaaaaaggcttgaagacatactccattactaaaataacccaattttatacaaattaatcaaaaaacgttcagaagatagtcaagcacaggaatgtcccctcctctccgacttttttctcctgtccacacatcttcacacacctccagggatcctgcttatccagctatgcccaatgtggtttagccaaacctctcattttacatatggcagcatgggttatctggccttttcactgacatagtttctttctattccacccctgttgtgtctaagttatgctctaagagataatcagtattaacaagagagaggctagtttgtcttataggttcccacaataaagaatgtcaggttctaggcatagctagataatcaggatctctggaaggatgtgataacagattgataactgtctgaaactagtctgcttgctggtggagaggtttatgtgcacagactgtaagacgacttacagtaataccttgataaataccagttttgaagactttcaggtcatttaactaaccacactgctgagaacctgagtctttcttcagtgcatttcataccctagttttaagaaatttgagcattttaaaggaaattagaaatttgagtctagccaaatctcttaatctgcatatagcagggcaggttctctagccctttcactgacagagttcctttccattccacccattatttagaagttatgctctaagagattatcaatagtaacagagagaggccagtttgtcttataggtactgggttcccacatgaaagatatgaggttgtgggcaatgcattttcccttcagtgagccaacaggcagtttcaaatagctatcagtttattatctaggaattacagtactctttttggtcaggtaaaatgtagaatactgtacccttcttccccaacacccaaataaaggcaaaaccatctacctataaaatgcttctgcaaatcatttagatattatcatattttaagagctattaaagaatgcttcttaaataagaagactaccgaattatagaagtccaaaaacagtaccaaattatgaagaggtggtgttccacactgtgaaatctgagggcttttaaattagtatttttacttatgcaactcctttttccccacgcttaacagtgaacacaggaaatatattttcacttgttcagtctcttaatactgagcatctcttctgtgccaagcatggtcaacatctagagacacaatgccaaattcgaacatggtccttgcccttaaggaacttggtctaggccaggcgcggtggctcatgcctgtaatcccagcactttgggaggccaaggcgggcggatcatgagttcaagagattgagaccatcctggccaacacggtgaaacaccatctccactgaaaatacaaaaattagatgggtggtggcgcatgcctatagtcccagctactcgggaggctgaggcaggagaatcgcttgaacccgggaggtagaggttgcagtgagctgagatggggccactgcactccagcctggcaacagagcaagactacgtctaaaaaaaaaaaagaaaagaaaagaaaagaaaagaaaagaaaagaaacttggtctatatgctctgagggagaacttacagggtgctttgagagcatgaaggagggtcttctaacctagcagtgggatcggggactgaagacaattagaggtttctgaaagaactgatgtataaattgaaatctgaaggattatcagggagttcatgggagaggggttggtgtaagaaccacagagtgttctaagcgagagaataacacacacaaggtctagaagtgagagggaagttagcctatttcagaaatggagagaaaatcaacatggctatagtttaagttgcaaaagaggggataactgaccagccatggggctgcagaggtaagcagaggcaagctcacaaaggctttgtaataaatggaggaatttgggcttaaatataagagcaatgggaagctgttgaagaggttttaaacaagagtggtaagagacaaaatccgtttcaatcacctcttaaataaatggttagatcagaagagcacttctgaattatgggagtccaaaaacagtaccaaattatgaagaggtagtgttctacgatgtgaaatctgagggcttttacataaatatttttgctttccaaacactgtaggagacccttaacctcattaaatggaagcccttgacaacagtcctttattccagatgagcacaactcaggaattatccatctcaagcttatgatagaaatagtaccccatgtcagaaaaaaagtacaaaggcaggattttacctcatagtattccacatgaaagcacaaattagtctcaatcacacatcggcatcataggaaaatctcagaatttcagtattggaaagaatgttaaagatcatttggtccaacaccttcattttacagatgaaggcagtatacagattatttcttatacaagactgtggattctgccttgggctctctctccctcagatctttcatgaaggggggaagtcagcttggcatgtcatgagtagccctgtggagaagcccaggtgacaaggaactgaagcctcccaccgcctgccagtgaggaactgaggcctgcctgctggccatgtgggtgaacttgacagcaaattctccaggcccagttggttatgatagtggtcccagctgatagtttggtaagaacctcatgagagaccctgagccagaccaccttgttaagccactcttagattcctgacttcaggaactgtgtgaagtaaatgtttgttgtttgaaagtgctaaactttggagtcatttgttaagcagtaagaggtaactaatgaacagtacacaaaattaataaattcttaacaaacttacactatgcttcccttgatatctaaatagtagttattttctaaacaataaaatgtatcttcctttaaagatactaccaattgtgctcttcttctttgaaaagaggtgattaaatggcttatagaataggtgataggatatttagtcatttagaggtcactgactctaatttaacctgagttcttggcaaccacacatagataatactgaaatttgtttgcaaataattccctatggctacatattcccattttaatgtagctgttttttttaaatctccgtacatacaaaaatatgaacttaaattaaaattaccctttcttcttagttctaagcagccttagtaggatgctgagtaagggggaaacaacagcctatcaattgatgatgatgaccatatgtaaaataatcacttttctaatttaataaaacctccaaagttttgtccttggaagaaaaacctcccagtgaggaggaatagcaattgaagtaaacctggcccctcttctaagttttgtctgccttttatattttcaatcccattattcattcagcattccatcaagaaatactcactgagccctttccacataccagacacggataacaataacgaactagatagacaaggctccaccttcatacacatttttatctgggtataggaaaaagaaattaagcaattacaatatagtggtaatcattagggaagaaaagtagagggtgcagtggaagtacctagcaggatacctaccctagtacattggtgggaagagatataggggtgtggagtgggacatgtgagagagtctagaaaaagcttttttgtaactgacatctaagcgtaatgttaagatgtcagaaggtatttcaggcaaaaagaactccccgtacaaaggcctgaaggtaagtgagttacatttagaaacttagaagttcagcttggctgcagcatagcattggggtagtgtagccccaaaatggatacaattccctctgctgggcttccctgtaacagagttgacatggtggagaaattaaaaaataacaaagctttaggctctgacctcttgcacattatgctgcctgaaaacatttatgttccagatgcagaaggctaatcagtctggcaagaattctgaggttggaaaaacctgctttgaatcccagcttgagaccagtaatacccacaacaggttgtgtagaggttaggtgaaataataaatgtgaagcatcttacacacactaggtgctcaaataattctctcccttcagttaccttgcttctgagcccccagctggactctgagctgaggacaccatgtcaccatccaccacacatgaccccatgacttggcagaggacgatgcttttcttggccatctctatgtccatctcattcagttctagtctctaccctcttctttagaggaactgcagcattcataaaacaagaattatagccacacgcacctgagacttgttccattacactaattgtactttatatttgtatatgtacttgatctcaattattccttttgagaacatcataaggttgagtattgtaatcactatttggcagataaaagccctaggttcagagaggtacgtgatttatcttgactgaagctttgaatgtagctcctcattttctaaacgagttctgtcaaccctacaaaggctgcctcccagcaaatactgcaatgggcatatgttttaaggtatatttgcactttttttaaacttttaagttcaggggtacatgtgcaggtttggtacataggtaaacttgtgttatgggggtttgtacagattatttcatcacccaggtattaagcctagtacccacattagttatttttcctgatcctctccctcctcccaccctccaccctccaataggccccagtgtgtgttgttcccctctatgtgtccatgtgttctcatcatttagctcccacttataagtgagaacatgcaatatttcgttttctgttcctgtgttagtttacttgcagtttcttttaaaagttattaagactcagagaaacataaacttttacaactatatacctattcatcaatatacaactgtataactatatactctttcacacatattttaagttctctgtgtaaaactaaagttggggggtggtagtggtggcaggatgttctcagaatactagggccttcaaaggaccatcctcaatactttgatgataggtatcactttccatttgcatacttgcccagctatgctcataacagtaaaaataaagcttcctaccttcttaagaataaaaaactgtctcccctgtgaaaataacacaagtgaaagacttaattattcaggtggacttcagctgctgatttcaaatggaattattctcttatgatcacaggatgccttgtaagttacctgtttcaagcccagtctctgcctagggaactgtctcctatgaaaaggagtccgggtggaccatggtggctcatgcctgtaataccagcatcttgggaggccaaaaagggaggatcgctggaggccaggagtttgagaccagccttgacaacaggaccagataatagaccccgtctctacaaaaaataaaaaaaaaattagctgggcatgatgactcacacatgtggtcctagctactcgggaggttgaggtgggaagatcacttgagcccaggagttccaggctgcagtgagctatggatgtgccactgcactccagcctgggtgacagagcaagacctcaactcaaaaaaaaaataaataaaaaagaaaaggagtccacctcacttctgaacagttcaagttgagtccataaatgagcctatttctgtcttccaaagatatccatataagacttttcccaaccaccccccgcaaccttgcttcctttcagtgtttctccaaaggtggtgcccagattacctggatcaaaatcaccagggtactgattaacaggagattcctgggtcccaacgctgacctgaatcatcaccaagaaatggtgcattcgcttttcatatcacattacccagcagattcatacttcgtgaattacacactctagatctctgtcacacaaaaaaaatggtcttaggcaaaatctctcatcttctacttaaaacaactggttttaacctaaggggctgatataaatgctaagtcaagcagtgatttgtgtttaacacttgacagtccctcttccaggtactctatatagtggacttttatacaatatgatgtacagtccttcagccaaccaataatacacctaactacaatccattctacatttccggaaccatgctgttcatgaggatatcacttcagatattttgtggaaattttgaaattatggcatctacagaactccctgatatactagctattgtaagccaagccaaaaagcacatgaaggtagtttggtataattctttatctatcttgataattgaaattgtttcactgtaaaactttacataactgagctttgttttaaagcaaaaaacttgcagatgtgagacagtacgagaaaaaagaatcagctgttaccatcttaaaacttaggatagcctaggtgtggtggctcacagctgtaatcctagcactttgggagtacgaggcagattgcctgagctcaggagttcgagaccagcctgggcaacaccgtgaaacctcgtctctactaaaatacaaaaaaaaaaaaaattagctgggcgtggcggtgtgcacttgtagtcccagctacgggggaggctgaggcaggagaattgcttgaacccgagaggtggaggttgaggtgagccaagatcgcaccactgcactctactccagcctgggtgacagagtgagagactccgtctcaaaaaaaaaaaaaaaaaaaaaaaaaaaaaaaaaaaaaaaagaaaagaaaaaaaaccccaaaaaacttaggataaaatcttaaaacgttttgttcgacttaaatttaaattagcagtttaggatatagtacactgataatgtaattacatacattctgctataaaggcatagacatctttattgggagatatgggcagaaaaattatttcctcagggtggggcatttggctaaacacttgccaatatcctttactgtgtaatttaggtaacacaggcagaaaaggcgtttgaaaagcagaaatcaagtggcaaatatcagatctgagggacgcaatgagggtggagttgaaatccgtggtccttggatttgaaacttaccagcccgtgaacaaggttggtattgcttttggcataagacgacagcctttcttttcattagctcaggaggaatactggctttccaagtgagctcctccaatccagtgatatttgcacatctcacctgggcctttcggttacaaattcaccaccttaaggagccgtgtgaaaaagcaagaacaatcaataagaaggaaaaaaaaaaacccttcagctataaatcagccacgtggagctgctgcagcagcagcggtagtcccacttcctggttggcttcctgaaagcctctcgacaaggggctcagggaagtgggtctaagggagaggtgcagacgagagcgactccaggtccaacggagggggcggcgggccacgggatcccggagggcacaggcgttaaggacggagttattgtccataattacaataaaagtttggggatctgaaagctttaaggagctgagctgcagggcaaaggctaagaaccggactcgggaaaagtgcaagttagttacaaggtagcagggactgtgaagggggctcgcgtggagagcaggggactgcggatctggaagggggcaggtagagaggaaggcagcctggcagagcgaggcacacgggtcagtcggagctctgcggtggccgccagaggggagggggccacggggaggagcggagggaagagcccggggaaaggtgtagccgaggggagttccggatctggagctggaaagggcaggcagcggagagggcggcagccgtagcggtaggggtgggggaaagagggggaggagagccggaggagggggaaggagggaggggagagcggtggcggcggctgcgccgggctgtgagtctctcgccgccggaggaagatgaggctgaagattgggttcatcttacgcagtttgctggtggtgggaagcttcctggggctagtggtcctctggtcttccctgaccccgcggccggacgacccaagcccgctgagcaggatgagggtgagtgacccgcccggccccctccggcggcagcgaccggcaacttgttttgtttgcccgcgtgtggagggagcaggggcggcggggtcgcggcacggcgtgggcaccgcagctccgcaggtggtgctggcgcagcgcgggccgagggggtgccgagccccgcgcactccgacctccctggccgccgccggcccgccccctcgccgccccttcctccgctcttccccgccccgggctccgtcgccgacacccgcgctgccgcggcagcggctcgggcggccgctctccgcgccgggactgcgggcggagcgggcggagagccgggtccggggggctgcggccgcccggcgtcccgctctggggggccgggaccgcagcgctcacggcccggggacgcggggttggtccaggctgcggcctgtggcgcgtgcaggcctgaaggaggcgagatgccgatgccgccaccgctggtccggtggaccaggccccttggtccagcctcccctcccgcagccgcccgtctgggggtgttcgcagccccgggctcccccggcccgcccgccggggagtgggagggcgatggcgccccgcctccggctcttacggagagcgcgcctccccctcactccggcggcggggagccggggtgcgatgcgcggccgaggcctcgcccggaccgccggtccccctcgcgtccctgggcgagggaggggcggttggccggagatggcggaggggcgtccccgccccgcctgcccgccgcccccagccctcagcgcctggggaagcccctgctgtggcagtgctcgggcgctatccgggggaagaggagcagttcctcttccttggctgcggcagggctgcttgggccggaaaactaacttgtgtcggcgcccggccgccccgcgccggctgccggctagctcaggccgacgccgaggggagcggcggcgcggagctcgcggcggctccgctgggacgcatttgtctgccgcccagggcgcgagtgttagcgctgacattccttggatttggagggtttagtcaggcgcctcggaacattagttacccggagccgcgccgcgcggggaagggaccgcgggcactgcggcttccctgacccggcagcgggcggcgcgcaccggcctcgcccccgaccctgacctgcttccccccggatgaaccgttgcaccacctgcttcctcctccccgctgggacagccaactgggccggctgccagtgggggtaggagagggtatgaggggctcacgaccgccgaggcggcggggctgcaggaggagtcgagtcgctctctctgttgtaaagtgctttttgcaagtgtgatgagcatcgcttctatgtcatgtttatttaactttccttctggaaagttagcatcaagaagttgggcaaaaaggcttgtggcgtcctttcaagagtaagaatcctaggaggagatcccattatcagctcttcgcctatatcatgagattagatgtaatctggaagttttagtatttgaagtctctacagcagtggaatccctttgtaatatctgggatagattcccatctaagtcatctaaattgatggtaataaaaagtatcagttttccttttcagtacatttgcggttttaagcttctcagctcatggagtgatggtgatctttttataattttgctctcaatatgacttattgacaaaggataactgaatattgcaattgaggatatttgttttaagtcatcaaatggctttttacatgtagctagaaatgtttaaccccctattttctggtagagaaactgacgaaaaactgacaaaactagctaggttcagaatgtcccgcccttctgatgatcttttaaagaggtggcggaacatcagcatcacttgccaactcgtggaatattttattagtgcaaacaaaggatgggccataatgcccatttcagtactatatggtgatgataaagaaggtgatgatatcttgattttttgtttgtttcagtgtacttgataaagtttctcagtggatccagtgtaatttctgtcatttgtcaaaaacaaaaggtagattttaaagacttaacataattaacattaagaggaatgcttaggtatcagaagagcaagaaagacccttttattggcttcccaggtaaatagtaatacaagcaatttaaagtgtagcttataaataataagagcataaataagggattattgccttcctttaataaagactaacctaggagcttttaaggtacagtgctagaaggacaaatcctgtagggaggattctgactcctgagtttctcctcccccttgtggttcttttacttcgatgactattgcatatattccacccatggtgagatctctgcttctctttaatgctgatctacacatggacttttttggatccctttaaatagcctgaacgatccagtttaccaggtatgggttctgcctctactccagcaagcttgtacctgtggctccattcaccctgtgccactttttgtcttgaactatgaatatgtcatacactaaattctgttacagccttgacaacttgggatggtcctttctcatctgcactatttccttgttttaggtctgtccacctgtggagtcaagacaaaagaaacatgtttcttatttccttcccatctctgggcctcttgccctttctctgaagtgaatgatgtgaaaaatgaccttacatttccgatcatattctgttgtgtgattttaaatattgatttatttgaacatttttgagtgccaattatataccaggcatggtactagttgttaaggaaatactccttgtccttaatctcatggatcttgtaaaaaccacacagcaatcaaacctcgataaatatataaataaaaattgtgctactgctttcatagtgaaaaccatagggggcaagaaaatggaggaatttggtcataaaagccttacttgaagaaatgactattagcagtagcaaatccacacaggtctgaagcaactcgattcttacctcctgtgggaaagaatttattggaggggcataaggcagagtgagagaccgaggcaaatttttgagcaggagtgagagtattaaaaagctttagagcaggaacggaaggaagtacactttgaagaaggccatgtgggctacttgagaaatccaagtacctcgtctgaccctggacttggggttttatacattggcatgattccagggtttgcgtttcttctcccgtgattcttcccttggggtgggctgtctgcatgcgcagtggcctgccagcagcggggaggggctgcctgcagtgtgtttactgaagttttactcatgctcacttgaggcatttttcccttacaatttgagccttcctagaggaagggcatatactagttaaaagctgccattttgcctattagtgcacatgctggagcccacttgcccaactcctgagatcttagtgggaacctgctgataaccagctttaggtgttttctatctaatgggagactgcctttccatggtgttggcgcgaccaattattatttcagagagacagtttaacaacggcctgaccatcacctgatggccgcctgacattcctggtggtggggggcctttcctgccctgctcatgtctgcctagctgcctactctgacttttgaggcgaaatctgaacatttcaagaaaagtagttaatctggaagtgggtggcagcattcttgagaaggagcatttgggcaaaggtcctgaggcaggaggtagcatgagtgaaatagtgagaaactaggagataaatattgttggaacgtggagaatgacaagtagaatgatgccacacaggaaagcatgggtctcgtagtccatgctaaggaggagatcttaagtgcggtgagaagccgttgaaagattttaagtagggaagagtggatttgtgttttgaaaagatcactctggctgcctacagaaagtatgtatttgtctatagaacaggtagcaggagtcctggtgggggtcatcattattcaggtgggacataatccttgcttagattggcagggcggtggtagagatagaaaaaaataaattgattcaagagctcctaaagatgcaaaggcatcaggatttggctattggatatggtagtgaaggtgtcaggaggcctaggatgatagattatttgtttcattatggaaagttctcaaagcaaaatgtataccttcttgtattgtattttatgattatgggaagcttttttttttttagtctttgccctctggatattttaaggtcagcatttattaagattatctgcttggacttgcaaagcacagaaagttcctttaattaaataaattatgtcccagactaacaccatttatcccaggttttagccctgagtgactgtctacagttgacccataagcctctgaaaataaaggtttttaaaggaaatgttgacagatccattaaaacagcagtcccccacctttttagcaccagggactggttttgtcaaagacaattattccacagactgggggagttgggttgggtgggggatggtttggggatgaaactgttccgcctcagatcattaggtattagattctcataaggagtgtgcaacccggatcccttgcatgcagttcacaatagggtttatgctccatgacccagggttggggacccctgcattaaaacattcagtactggtgagaagctgtgtgtaaactaatgactctctggatatgcaaatgcaactttagtcaagtcattaatgccacttaggttcagggcgtatataataggactaattcaggaactagtaggccaagaggttttatgtgataggcaagctaacaggtttgaaaggaatatagcttaaatgaggattagtggctgaactgattaccctggcagtcaagttccaccttaccaaagccattttatctcagtgatgatcagttgtaacctgaaaaattctgcccttgaacatgagattgtacttcaaatggaagctctgtttatactattagggatggagctatcacttagtgaaagtgtagtgtcttaagtggtcactgttctctcagtttcccaggctatacaccttaggattggtttttgtttcctttgctgttttcagtgtcccatcccccttctccccccacacataataatgattaaaaatatcacatcaccaagtctgagaagtctggggtttatagacttcctgaaattaatgcagaacttttgcatacatctacatttttttctaggttgataatcagaagctttcatgtttcctaaagtgtcctctaaaccaaacaaggcttccagccactgaccatgtgccctttgaaggcagggttcatgtttcctgtttgttgagtatttcctccatctttcctggtgctaattttatggaaggcacatattaaatatttttcaaagaaactaaggtacatccatttatgtctcccacataggtctgaacatttcggaaatgtttggcgaattcctaagaattgttgtatttatcacttctgtggaaaagttttccatccagtggtctatgtgaggtcaggcatcagccctgttaccacctgcttgcccctcccccatccccatcctcccctccctaagacctcatgaagaatactgataacacctgaagtgggagttcctgctctcacaatctagttgggggtggggagagctattgcttaatccagtagcaatgtaaagaaataatacaagaactgtcacaaggatatgtttcatcagtagtcaaaccagtaggtggagaaggcttaaaatggcctttggggaatgcacagttactagtaaagagagaatgaaaacttttgaacagcagtctattttgtgacttaggctggttgcatgggatgggagataacgtgtgagatacgatttgggttcctgtataaactgttagacaatagtaaattggagaaagaggaagagagaaaataattcacgaatgaaaagcaaaattctgagcttgagccatctgtaaacagaatatgtggaaattctaacttgagttattaaaaaagttggtcagcaagatttgagtagctattgaatgaaggaaaatgactgtgattattcagctcctaactagataattgtctttgttcatattttgaatttcgattctcattcctgaagaatgaatgtacaatctgaaaagtaactaaattaaagatttcagtaataacagcaacaataatagtttacatatattgaatccttactttgggcctaatacatattctacatgtatttggttgtttatttgtaacaaccaccctctattgcaagtccgatggaatcccaactttatagatgagactgttgtggtatagagaggtgaactctttgtccaagtttattcacttaattaattgtagagccaggattcaatctcaggtgttctaacttcagagctgtgctctctgatcttgcactacagtttttaacaacacagacaagtacacatgggctacattaaaaggtggatatgtagacgctagctgggtaatttcagataaacactgaagacaatatagatggtccctgacttaccatgattcagcttacgatttttgacttttcaatgggtttatcggtgtgtaaccctgtcataagtctgagcacatctggacttaagatgtcttatgattcttcaagtttacagtgggtttgttgcagggtgtaaccccttgtaagtcgaggaacatctgtacatggtaatatgaaagagaatgggaggctggtgcggtggttcatgcttgtaatcccagcgctttgggaggcctaggcaggcgaatcacttgaggtccggagtttgagaccagcctggccaacatggtgaaaccctgtctctactaaaaatacaaaaattagccaggcatggtagcacacccctgtaatcccagctactcaggaggctgaggcaggataattgcttgaagccaggaggcggaggttgcagtaagtggagctcgcgccactacactcaagcctgggcaacaaaacgagactccatctcaaaaaaaaaaaattaaaaacaaaaagaaagagaatgggttggaagggaccactcagggaatgtcagggaaggtgatggccagagcagagtcttcaggagtaagtgtaagactatcatgcaaatctggcggaaaagcattccaggcagagggaacagaagtgcaaaattcctgaggttggaatgaggctggagtatttgaagccagtatggccggagtttgttgagtttggaggtagtacagtacgggatgagcttgaagatgtagtcaggactcagatgatgggggtgtgtggctcttgtggtctgttattagggtgattatttgttttagtttacatttgctgcccattagccattattatcctttcactctcagaagtgtcctgggttggatggtaaattatatggatgtcttgcttaaagtgtattttcctagataaataaaatgagtaataaccctttttggccacagtttgtgggccagatgcacaagtaaacaattgtgctgggtaagacaaaaactgtattagttaagtccactgagtcctgtgggagcacagagaaaggagcatctagtgtatgggactggatgctgtcagagagcttgtcttataaaaagagatgctggagagatgaggacagaggagactgtgcaacagcataaataactgtgaccaatcctggggactacatggctgaaaattgggttggagaggggtggaatggaagagaggactctagaaagataaatagaatctgagccatgaaagactttgaatggtcagagctgggctataaggaataatctggaaacagtgcaagctagattttagtgaggagagaattatgtccgaaggatataatgaagcttaaactaaggagaaggacctagaaactgaatacagaggaagagattatggaagtataatagaattgcccagtgggaggaggaatcattcttgatggtaaaggaaaggatgttgatgcctttagaaggaatacagctgtccaaagcactggctctcaaacttctttaggcttcggagtcacctagagggtgtgagaaaacggattacttggccccatcccccgaatttctgattgagtagatttagggtagagcagataatttgcatttctaactagttccccggggatgctgatgctgctggtccagggatcatgctttgaggagtgccagtctagaggttatatagatttgggggctgcaaaatgaaaatgaaaaatttggtttggtttggcatatagtattttatagaacacaggtcagtcaagtgaaggtgtcttaaccaggtcgatggagctcagaatggaatcagaagtggatgcatttcattggccagagggtggtgtctgaagcacagggagtgggttggtaagttaaaggagcctgtgtggatggaggagaaaaatgtgtgtattaagaagaaacatggaaaatgccttcttttaggctctaggaggttggtggggagagatgaaagaaggcatagacagaagtaaaatgacttagacgatattgcctaaccgtgagcaaaaataatttctttaaggacagggccatcaacaaattcagatgttaaaatgtttgagaactgattagaatgaaagctgaaacgagtggctgtggaagcattacctgcctgctaacctaaccagtagtactttggtctagagagggactacagcagcatcatcattagcatctcagtaaatattgtggcccagaaaaactggttcagatgataaagaagttcaggtcgtgaagagtcatcttcactatgggaaaaatacaaatagagaaaaagttttattagagaactgtaactatcaaagaggaacttaacccatttttggttatatctgggctaccataactttatgtgcctttccacctctccctatccgcaagtctgtgtgtgtgtgtgtgtgtgtgtgtgtgtgtgtgtgtgtgtgtgtgcgcgcacgcgcgtgcgcacagacacctatgtatatatattttagttgtgatcatatataatactatataagatagatattgcaacacatattagtctttttttactcatgtctgaaatctggtgatttgaaaagctgtgactagaaaaccaatttaatatttaaagttggaaaataaattttattctgagaacatgaggcaatttttagtttttagtacattaatttgactgaaggatattaaaaaaacaatagcaaaactatgctattctcagcgtagagaaaatgtatgctcagcatttcaatactcttagtttttaaaaatgaggtttatcattaaattatagttcagccctgtgatcctgaaagcaacactgagacaacatgaactgcagtcacctagggcctatgtctttttggaaagggaagagctaactttcagttgcttaatttgctaagaatcctgaatatttccaaatgagaaatgttctcatttctgcaccattataaattcccttctgggcttcccagccttggaagcattttcaggcatcactcccaagaagcatttaaacatgccgacagggagacctgattcacttcactgaatacaagaactggtacactgaaacttgaggaaaaatttaactttacattatctaattaggtttatagaattggtgcagagcagcctggtttcccaaatctagaaggtacgattaactatagtattatatcaataccaactagtctgcgaataggcttctaagcaataggaatctgttattacaaagaatattttaaactggatgagttaaaattaagtcacatactatcggaaaccattttgtatgagaatagagtagatgacctagtcattttttaattttaatttttaccaattccctgggtttaggaatacatctgagcctcaagaggtatgctactgtcttcagtagtaaacttaacatgctcagtgattatctggcttaagtgtaattttggcatttgtagttacctttatgaaattattttttatgcatagctgtttactatgaaaactatgtattcactggtaaagctatgcttcctatgaaaactgtgtattcgctggtatcttataaaaagaaatggtattatttattatgtaagtatatcttaaataggcagtaactgagaaattgccaaaacttttttggagcgagttcactcttatcagaagttgggtatgtcagcatttttatttattaaactgtttgtattaataattctcctttaacttttagttttccttttaatagaaacatcagccaggtgtggtggctcatgcttataattctagcattttgggagcctgagcctggaggattgcttgaggctagaagcctgggcaatatagcaagaccttgtcgcttataaaacaaacaaaccaaacctgataagatattctttaatgtgagcaaggtttgcaagtagctttttcaactgtgcaaatgcccaactccttctacaagtggaacccttgatttaaaaccaacccattgattctagttattaaagtaaaacaatagtttcaattcctaatgtagtatgaagagacccctttgaaccatttcacagaattttaagaattaatacttgtagagaagtgatatcatgacaacatcaatgtagtatctttatgcatctgtgagaatttggtttttaaaaaatatattccttagaaagcctaaatagaaaacaaaacaaaacaaaagaacagtaaggtacagttgtacattgcaaaaaagaagtccttaagtcatgatgcgtgaagttctctagaagttcttgtcagtacttactgctgtacttcaaattttttattctgtagatatgaagtaaatattttatatactttttattaacatttattatcgcaaaaatagttcccttacaaccctagcataaattaaaactatcagtatacttaagtgagtcatgcaagtgtcattttgccaggatatataaaagatatctgagtaatgatatttagaaatggaaaatgtgaaaatagcatcattataggaagattccaaatctgtttagatttataggttatggtcatttatataaacattttaaaaatgacaggaacagtctaattacgttaagtcaattaagttttttttttgcttgattgtttaatgctcttatgaaaaacacatatttgtaaaagaaattatttgcctagaaaaatttaccatgcaatatatttcatcatattggagttccttttttttttttttttttgagatggagttacactgttgtcatgcaggccggagtgcaatggcacaatctcgactcactgcaacctctgcttcccaggttcaagcaattctcctgcctcagcctcctgagtagctgggattacaggcgcccacaaccatgcccagctaatttttgtatttttagtagagatggggtttcaccatgttggccagactggtctcgaacttctgacctcaggtgatccgcctgccttggtttcccaaagtgctgggattacaggcgtgagccactgcacctgcccagttctttgttaatgaaagcctgtgtacctggaagtcaaaggtatactttgcatagccatttcaaaacttgtcttaggtattttctaaaatgtttgtctcattggatataggttttgattgtgcttacttgagaagacttaaatctttacccttctcctggtagttttcttctggcagttcagtattttgccatgcaatttttattagacaatttgatcattgtgtttcttattgcctaatccaacagatttaatcttttaatctcaaatacagcaaggtgtgctgtgcctttacagtctgtttgcagagttttacatcttcgtttgaaaggaagtgtttaaacacccctgttcaaaaatctgctagttcttgccaggatgatttaaaatgaattttaaaaatccattagatttttggcaaataagctctcaattatggtacagaataaatgactacaaagtgctttttagagtaatggaatagaaatgactgaaattttattactttacacatgcagatttttctactgtggtagatgttcttaaactaaaagattactgtcaagattggaaatttttatcacttaaaatatataattatatttgaacatttaagcagaagattgctggaatggggatatacaggcctgcagtttcgttaactgttgctccctgtgtgatggcctcagaggaaattctaagtccagtgttcgtcaaagaggctggagaatgtttcccttttagtgatcagtgaaaataaatttgcttacagtccagggagatcatggtagtagagaaaaaaatactttagtaaataattttctaaaattctctattctaaaaatatactaagaaaggatgatttttaaataccttggtattttaaagaaatacattttctgtatgaaattaagataactctattcctcttcttatagctaacatttagactctaaatcatggcacatgtaacacttctattttaaaataaatgtagggtacgtgaaagcacagttgttaactttgaaaattttgaagagtggaatcacctacagacataataaagctgaaaataccatggcttttcccaggtcctgctgtttgcttagcctgagaaaggaactgccggtatcatccaagtattggtcaaaatacatatatactgtatggtcattctcatattatttttcccagtgtcctatttgaaaatctgaggaaggttttaatgaatgcggcttcgtcttactttccattaattatgactgcaagaagagtacagccactcttgtttgatcagcctatacactatgactaaatggaaagtgaatcacagccagagagtctaatagtttcacagtggtaaaatcatgttttgtaagaagcagttatcatccttgaccaccgctctgttaactggtaacagtaagataaaagtaaatgttaaaatctttcttatatgttggcaaaaatcacttcctaaagataaatgaatggcttgaaacatttattcttatttgcaactacttctttagcttaagtgacaggtacttatgtttaaaaataacatgtcttgtgtaatgatttatgattctgcatttataaatgcagaaagaataactaaaaggaagttgtaagtgtcagttaaggaatagatgcttttttaaatatagaaaattagaaaacttaaggtaagagcaaaagtaatatacatttgttcagtatttttgttttctggtgaattgagatacttttcctactattcctttaattctttttaaaaataactacaatctatttttttctcccttggaacagtggattcctttctctgattatgaggcctggaatttgagtgattcattggtcagtttcttttgggttccagtgggtgctaaaagtaagaatgattattttaaggataaaaaatgtcagttgtatattttattgactgcaggtagctagaaaaagtaaacttgccatgtgggcacacagcgtgttgcctctgaatgatgaggcaagcaggttactcataatacacacacacacacacacacacacacacacacacagcgtgttgccccgaatgatgaggctagcaggttactcttaatacacacacacacacacacacacacacagacacaacagcgtgttgcctctgaatgatgaggctagtaggttactcataatacacacacacacacacacacacacacagctttttctctatgtacctgattcttttaaattaaagataaccaaacctttgaatgatgaggctagcaggttactcataatacacacacacacacacacacactctgctttttctctatgtacctgatacttttaaattaaagataaccaaacctttgaatggtgaggctagcaggttactcataatccacacacataaacacacacacacacacacacacacacacacacacacacacacacacactgctttttctctgtgtacctgatactttttaattaaaggtaaaaggtaaccgaacctttaactcttgagccagtgataatgagaaaataaaatttcatttctaaaattagagataatggaacttaaaaaaaatgtgttctctgtgtcatctctgtgcaccccctcccactattcctctcacacgctgcactttttttttttttttaaagctgcattaataggctgttatatcctttgaaataccacaggtcttgagagggatgaatgatgaaatgtaaagatcagtgattgagcaggaatgggagaaagattagggattgggttttctggcacaaggctcctttctgtcaaaggactgcaaattttcctgggttgacgtgggcttaattttttttttttccccaaggcagaagaatttttcttagtacagaacaaaatggagtctcctatgtctacttctttctacacagacacagtaacaatctgatctctctttcttttccccacatttcccccttttctattcgacaaaaccgccatcgtcatcatggcccgttctcaatgagctgttgggtacacctcccagacggggcggccgggcagaagcgcccccccacctcccagacggggcggcggccgggcggggtctgccccccacctcccggacggggcggctggcctggcagggactgccccccacctccctgacggcgcggctggccgggcggggactgtcccccacctcccagacggggcggctgccgggcggagacgctcatcacttcccagacggggcggctgccgggtggaggggctcctcacttctcagacggggcggccaggcagagacgctcctcacctcccagacggggtcgcggccgggcagaggcgctcttcacatctcagacgggtcggtggggcagaggcgctccccacattccagacgatgggcggccgggcagagacgctcctcacttcctagacaggatgagggtcgggaagaggctctcctcacttcccagactgggcggcggggcagaggggctcctcacatcccagacgatgggcggccaggcagagacgctcctcacttcctagacggggtggcggccgggcagaggctgcaatctcggcactttgggaggccaaggcaggcggctgggaggtggaggttgtagcgagccgagatcacgccactgcactccagcctgggcaacattgagcactgagtgagcgagactccgtctgcaatccctgcacctagggaggctgaggctggcagatcactcgcggtcaggagctggagaccagcccgaccaacacggcgaaaccccgtctccaccaagaaatatgaaaaccagtcaggcatggtggcgcccgcctgcaatcccaggcactcggcaggctgaggcaggagaatcaggcagggagattgcagtgggtcgagatggcggcagtacagtccagcctcggctcggcatcagagggagaccagggagagggagctcggcatcagagggagaccagggagagggagagggagggggagggggagggggagaagtgggcttaatttaaaattgccttatatatgcagtgatgaaaatcaaatcaaatttaaattactatatggaacaacttcctgataatgtaaaaaaaaaactgatttaggagagggttttcggtactttgaaatattaatattatgaaagttgaacactgatgtttcaatctgcttcactccatccccattacttcttgtcagctgtctatgagcattgggccacttgccacagttttacatgataaccatatttaagtggtaaaaaagatcagaacatatacagtgccttcttaagtcaggttcctgatttatttctggtactatccatttagatacatattaatttacctaatttcttaaatccatggaccagtactgatattcctgtttgtctttatttaggattttacatgtgtacgttaaaaaatacattggtaacagctgactgacaaccaaaaaagtaaaaaagcaaaacaaaaatcaccgtgctttgacaggtttgtcatgaagcaaaatgcatgagaaatttgatctgtttcagtttgcttgttatcagtcagaaatcacctttgctttgcccagagaagactcaggttcactgaattctcttcaccactccgtgaaagtgtgtagcagcatggacagcccatgttatgtacagagtaaatggtgcactgggtggcatgtggaatcttgaaaggacagtgtctcttagatgcttaacttactactgggagtgaagaagatcaatgaatctcaaaaaaaaaaaaaaagtggaaaaattccttttggggaaaagaagctagtataatttagggttttaattactatcatacttgattgagagaaatcccttactcttaaaataatacaggtactgcatttcttattttataatactgcttaaatgcttcctgtcctaggcagtataatgaattaaaatgtagtagatatttagcacaagcaaaaaggacttacagtttaggaatactaaattcagaactctgtattgtaacaagttaccaggaagtagtgggggttaaatctgtgctgctgggaaagtgtgttttgttttgtttttttaatttccttgtatacatcttagagtctgcagtttgtatgaaccgtgtgctagtcaagaaagagataaataagcattatttaggttcaagagatttagcaatcttatggttttgggataagctgctatcctagtgatgttttcttgtcactgtctcactgagattttgaaaaactcaaacacatccttaatcaatttgaaagattcctagggaaattacattcaacttgattatggtattccttatgagagcttgggcatagggcaaggagagtgaactttaaggtgtaggaagaagataagtatgtgccacataaaaggaggaggggcctgctatatagtacaaggtcatggcttaagccaatcatttgtcatggggttggggagtctgaaggatgagtgggtctattttaaaaaaaaattgcgttgataaccatgaacattaatccttatgaatactaaatgttctagagaaattatattgatgtgtaattttccttattgtgaaacatatagctccccaaggacaaggtggcagctggcggattaaaaataaaagctgacatcattatatagtaaaagtacacatggactctgacatgggttaaaatgctggtgcaatcactgttaatagcgttagtgagtttcgctgagtgatttactttctgagagcttccttttcctcatctgtaaagtagacataaaatcaacttcatagcaatgttcttgtgcttcctttagatacgtttatcagagcttctatggctgggtttaacttgcacttttatacatactgtttttccttccttctgttccttcttcttggatgagcaccataatttgtacatagtttcaagagtgctttaaaaatgaaaatacttaagttctgcaaacttattatgaattcattattttgaattgtaagtgaaggagggctgaatattgtcttttctcctggacttttagacttttgccttaaaagttatatccttaaatgaacagtgttctcaaatggggaaagaggaaaatattattgtttacttacttttttttttttgagatggagtcttgctctgtcaccaggctggagtgctgtggtgcaatcttggctcactgcaacctccaactccctgggtctcctgccttactctcacgagtagctggcattacaggtgcataccaccatgcccagctaattttttaatatttttagtagagacggatgttggccaggatggtctcgatctcctgacctcgtgatccacccgcctcggccgcccaaagtgctggaattacaggtgtgagccaccgcacccggcctacttacttttaaaatacatttacattaagaaaaaaagaatgtatgttcattgtagaaaatattacaaagttaaagcaagtaagaaacaaaattatctacaacccatcctatccaaagataattatcattagctattggtgtatttcttgcctaaatatatgtactatacatagacatagtccacagtataaataaactctgtggattgcttttttaatttcactgtagaaatattttaattgttgttaggatatgtatagatttgtaattttttttaaccatctggtcattttagtattgagatggtttgaggaaagaggacattagaaaaaaaaaaaaaacctgtgtactgggaattacagatctgaaattgtcatatacaccacatttgcaaaattttttcacctgcccttgaaaaaaaccaaggcatgattttgaattttataagatggtctattaagattgctgaaacttggagtgctttctggcaaaaccagcaattaaatgaagagaaacagaagccatcactagaagagcaactattttgtggcagttacttgtttcactatctcttccctgttctttaccccaacatagttcataacttaaagttgtggactttaaagcactctaaggcttttaaacttctgcctagtgagttagtattaagaaatttaagtcagtgccatggggttaaatatgaggtttaataaaaatattggtttcttaattttgtttattagtcttactcctatagtctgtgtgtcgtgaagcataatttctcttttctttctcctgatgcaactcagccactccaggattttctcattttccttcatattatgaatatgtaaaaattaaaacaaataccttttcttttagtcattgcatagttggactacacttatttcactctgaggtgatagggctcttcttttctatgtctttgcatcttaaatacatacagacattatgcatttatttatacttatatactaatacaacaggtcagcacagtcactcctcacccatgtggggagccaaaattctagtctgaaaattgagcatcaaatactaataagtaacttatactgaactcttaggtatgtttacattcttaatttaatcttctgacattttacagttgaggaaatttgtggcttagagaagttaaattaccttgcccaaggtcacttggtcttctaggtaacaactagagttcaaacctaggctgactgcagagcctaccttttcaggtgggattcagtaccaccaagtagcactttctgaactgtgttctatgaaccaaggtgtattatcaggcattactttaaacaggggttttgggccagtaaggttgataagtgttgcatattgtatcaccccctcagagatttcacggcatacattggtacgttaaaagctttgaaaagtactatagaaaagaaacttcagcattttagcatatctttcacaaactgacctggtcactgatccagtttttaaagaacatccagttttctttaaagaactttagtgtcctgagagaagagaaagcgctgtggacagatggacctgtcttcaggggaggaatctggctgcctctgctcgctgaattctgccttgaggccttcctttcatgttcatgtgcagcatggtatcatccagctgtgtaaatcttaccatccttcaagatcagttcaggatctacctgttctctgaagattttcctgaccacttgagtccataccgatatatctgacctcagcaaagttcctgattatgattgatggtaatgctctttagcacgtggctgtttccccagttggttcctaaactcctcaaaagcagacacaccctactttatattattcccctgtccgctgctgagtagcccctggccttactgccctcgagggagaggttaaagtgttccagtggtttttgtttggtttacaaatactcttcgtctccctggtcttgaaccccggttgagacctgcagttcattctcaatcctcaaacttgaggtgctcatgtgatcatcttacactcatatcagcacttatgctccccatattgttttccatctgaacacctctcactgatcttgcggttatttatcaaaaaagatttctgtttacagtgtatttcacaattaaaaattctactgatagttaaaataggtttcctagaacaacccctgcttggcagtcacctccatcttgctacattgccacagagcctgatgaatctgctaagtatttatgtttaggaatttcttttatgcaggaaaccccaacgttaagtggttccttgactccagttatgagtcaaatggttttaagtataacccatattagatttctattcatacagaaatagatgtccagtgtatgaattatgtttcagttatcggaaactcatttcatatcatggaaatatcaaaatagttcctccaaatcaaatatacttccaagaacattttgcaagcactagagccatattgtgtctattagttggataaatttttctgcataggcaagattgaatgaagtgctttaaaattaaattagtctaataaaagtatgcaccgaaaacaccaccttttcttttggcaactccctgcagtagtcatggatattcttcccttgctccgagggaattctgtgtacaaaattaacattatctatcttcaacatttttactccatattcagtgttcatgaatggctctggaagtctttgaatggtacctgctgggaaacattatttctaccactatcccaatcttatggaaatacatgaaggctgaacaatagattcaactctcagttgattctgttgactctgtgtgaactttaagggatagtaaatatttgaagtttatgttaattaaaatatagatttggctactataacagcaatccaaaatgttagtttttttttttttctcttacataaatacccaaactgataatggcaaaatagacttcatagtcttttatggtactgttagggatccatgccccttctctcttgttactctgtcattcctggagagttgctttagacttcatagtcttttatggtactgttagggatccatgcccttctctcttgttactctgtcattcctggagagttgctttcatctacgtggtctgagattttactaccatgtccacattgcagcagtaggaaggaaggaaacagaagggatttgcttcttcacctgtacgtgtcactttcagtatctttattctaggtagccatgtgcatagctaaaaatggttttagtgagtgggtaactaatgagatagaaagggagaaaggatattgggaggaatcgtagtctttgctacaaggtaataccgtataattttttaaatgataaagttgtataagtaagggtcaaaagtcacttgtagctaactttcattagttccaccttttccttgcctagcacagttagcatggtcttggtatctagtgtaaatctgatcttatccaaacatgaatttgttactttttatattacttggttaactgttgatttcaagtctcttttcagacttgtctcccaagttcacatgaatagggccaggctttaagttttttttaatgcgttcattattaccaagcagtgctttttaacactagtgttcagtaagtttattgaacattgggttatgatgatttattgaaattctacatttattgctttgcttggttgttaatagagtcaatgtctcttgtcttttttctgccaactggaataatccctactccacgtatgtgagctatatcctgtatcagaaatgtagaggaggcgtggaattggcaaagatttgttaccaaaaatcactatcagaccccattgctgttggcagtcagggaaccatggaaaagattatgggtcatggaaggttataagcaaaagtctgtggatttgcatagcagcattgagaggtaggtcttacaatgggcaggttgtattggaggactgaaaaaaaaaaaatggaaatattaaggaaacacacagatagtgattccaagaagaactagcaccaatagggctaaggcaataaaaggaagaggttgggattatcaaaatttggaagctcacaaaagcgcctggcaagttggggttcagatctctggggatgggatggggggggtacttggctggctggctgcctgttgtgtctctagaaaataatggggctggtttggggagtaggagtaggcttgaataaatgctgagaccactccaattactatggtgagttgcctttaagcagcgagcaaaaggatgtaagtctcttccgccagcccttctgcttctgtctagtgtcccctgtttggtaaatcctaatgggaaggctgttggcaagaaatttttgctaagttctagagccagattcacaaagcaaaatatagaaaggtgggtttggaactgaaagataataatcactggcacagtagtggatataaagtcttcctttggcaagttcagctggaagatattgtgccaaacagtactgtgacagaaattagagatggatctgggccagatggtatgtacaagattgagtagaagagtggtctgctcagtcttgaggagtgtcttgcacatataccaaagtcacttttacgtgagaaagcatgctttctattgcagtctagagtttcctttctttccttagaaatccgttgtgaatctattattcatgagtttccatgaccctttgttgaatttgtttgtttttagtttctgtgactcatcgaaaaactacttagtggatttttttaggtgtcttttgttatactggactttgaggagagaaaggtaactaagatataatctctgttctcaggtaagccacaccctggtttgtggtagaaggtgaatgtgaagacactaacattgtatgttaaatattaaaataaaatgaatcatacctgggaagtggaaaagggcaagtctggagaattaacttcgtgcttgtctttcaaagtaggactttgtcaggctgagggagaagtgtgtggagaagtgtgtggtgggtgaggacagcaagtagaaaacacatatttaaagggcatggagaaataattgttaagatgacatgtgctgtatatttaccagttactatataaagaagcgttattcctttgccctgaaatctttctttttttggcttcaaggggtcctccttgtttcagaattttgtatttgatatataccctccccctgtccattatgatttttctgtacttcagccatattgctgagatattcaactttataagcaacaagttcctttaaaaaaaaatacctttgtcttcaaactgaaagccgtctcatccctgtttttatataagttgccctttgcagaacaatttgtagtttctgtatgtggatcctccctacttctgaaaggttgtctggagaggtatcagaatcaccaaacaatgaaagatgcccaagctgccatgccaccagaagggggcatgtctcattcatatgtacactcgagttcttgaattatcatcgttgccttgaaaggctgtagaagtaaattattgggaaaccatcagaatgcacctgcctgagcctttctccctcagtcttcctgtttgtgttcagtggttaatattatcctctccacgtataaaatttgaattcagcaggaccttgtaagacacatgcgtttcattttaagctacatcccattctcagttctctgtccctatccatgggtgggaaggttcaaccctgttccatggacatagctgatgggacaggagtatccaagctaggtcaactgtattctctctcctgggatttttgaatcatgtggtgttgtccactaaagacggcacagagttggttggtaggcatagtaccagggtcagctccttatgcatcagtcacataccaggcaaagttatgggggaggaaaacctaaaaggtttgccaaggaagccagtctatagagaaaggagtgaagtagattttcactttctttccagaaaaagagataaaagaaagatgatatggacagggacaaacagacaaaaaggctcggcctctgcctctgcctaaggaccttctaatattaccatgagacgtgcctgttcttcctgctgattaggttgtgatataggcctgaatccttataacaaacactattttatttaagctagcttaaattggttttggtaacttgtacataaatcattctagagtaacatacactccttacagaaataatctcctgctttaccctaaaggaatttactattatggaaaattcacatggaagccaggaagggagatttttgagcaggaccctcaaatcacatacatgaagtttctgcctagcccttgtgtctcatctgtcttttctctcccctcaccccaactttattttttttaaaggcgttacattcacagaagacaaagcatgtttttgtataaccgtaaaattatttttctataattttttaaagtgatacttagctttttgttgatcttttttgacaataaaataatcatcaactgtgatatatagtatgaaatttgaagaaatttctgtgtaaataagtgataaagcagaaggcagcaaacaagaaaaaggcatttaccaacctcccaaataatgagtagtgtgttagctttgattacaatcccaaaactagtttttttgggtggttaaggttttcatttttaatatcctttctaaagaatatgaaattaatgaatttgaaataaatctgttattagggaggcatccgagtggcttataaaatagatgattttaccaaaaactattgttttttttaaaaggaggctaaatatattcggttgttgacaatactaattattgctttacttatgatgtagttactgtaaattttattcatatgctatgtagttatagtgaaagcaattagactttagttttcaattttcctatttgtaaatggatttaaagtctttttgatagtctaggaaccaattaaatatttctttaatggctcaactaattgctttataactattacttattttaaagtgtttgcttagggtacagagagttaaaagcattaagagataatagtaggcttaggagactaaggatgtaaactaattggggttcttattgtcagatttaatataacatgttaacatacagcatttatacagaggcattctttgtacatgccttaggttgtttaaaagggcaatttaaatttaaagaaggcaatttacttatcatctcggaaattctgtcttgttgccctagggctagtatgcaccatattgcatttaaaaaaatgtttggaaagctgttggaaactttttgtcaacacgtccacatttgcagtaatattctgtggctttgaatgtaaatttaggaatttatcatgttcacaaataaaggagagatgaagtttactaataataaaatgaaactgataatcagttttgaatctaagcagttgtttcagaggcggtttcatgtgagtctttgattaggattttgccttataggagataaatttatttatttattagttttttttatgttatattttgagttctagggtacatgtgcacaacgtgcaggtttgttacatatgtatgcatgtgccatgttggtgtgctgcacccattaactcgtcatttacattaggtatatctcctaatgctttccctccccgcttcccccaccccacaacaggccccggtgtgtgatgttccccttcctaggagataaatttaatctggttttcagccatagtagcattcagactgaatcctgaaaatgtcctctccactttttgctgctgttgaagagatcagtgaagggttttgtaaacctgaaaactctggcttagattttcttagctaaatttctacttagaatcagtgagtaagtgacatatgttaattttcagtgctagtttaataataactttttcataagatttggtttcacacacacataaagtctttataaagccatttgtttcctttaatttcaagacccaaaatattaatttggaattaatattgagtgttttgctcctgatgaagtgtccttaaacaagtctgtcatattgtttgaacttttatttctacttcctcatcttcaagtatttgtgactatttctcatgttgctaaatttagttatttctgaaaaagtaccaaatgacctataaacgcaggaagaacagtcttccaaagcctgaagggggctctgagtgactgactggctctgggcctaggctactttgaagtgcaattcacgtttgaaacagttctcggagtctaatgcccttccattcagaagacctgtaaatgcttgagttgtttctccatcttctctaaagaaaacctgactgtgtaatttctctaggatcttagggtcatgctgcaaaggaacaaaggtgacattaaaaaacactgtacttcctagttgccaataatacctgagtataaccccaaaacatatttcttctctaggaacactagatcctgaaggtaatctctcaaagtaggagcagagttgtccttacctggctaatcttcttggacaatctgtgattactgtcaagaacttctgttccattccatgcttacagtgaaatcagataagatgatgacttccatgagacaggtaaaggaatttacacttggtttactcagatgcatagtctcttagttaagacagtagatctggcatttgggatttaatagtgaggacaaagagagtgcacacacatatcactatgtggtttctattaacaatttaaaacctaaaactaaaacatgcctcttattaatgttgtacagtcaaaagaatagctgccttcaagttaacatggacatgactaataacttcagctgcttactttacttgctttcagatgtggaagagatacttactcgcaaattcctaattaataggggaaaaaaatctaacagttggacaatacaaaattacataacaattttctagttcatattttaatacagaagggagttttaagttggaatttttttttttttttgagacagagtctcgctctgtcgcccaggctggagtgcaatggcacaatcttggctcactgcaacctccacctcctaggttcaagtcattctcttgcctcagcctcccaagtagctgggattacaggcgcctgccaccatgcctggctaatttttgtatttttaatagagacggggtttcgctatgttggccaggctggtctcaaactcctgacctcaggtgatctacccgcctcagcatcccaaagtgctgggattacaggtgtgagccaccaagcccggcccagaatgtattttaagctgtttaaaatggaagcattttatatattctataagaccttctaaaaagaacttggaatttggagcagggataaggcactgttatttggtaacgtgaagttttttttcttcaacttttaagttccgggttgcatgtgcaggatgtacaggtttgttatataggtaaacgtgtgccatggtggtttgctgcacatatcaacccatcacctaggtattaagcccagcattcattagctattcttcctgatgctttccctgtccccacagacaggccccagtgtgcgttgttacccaccatgcgtccatgtgttctcatcattcagctcccacttataaatgacaacatgtgatgtttggttttctgggtaacatgaagatgttgttgtcatgaaaacaggtttgatgactatagtgtaatagtgtaataagggcctaacctcagagacactttcacatttggatttttctttgcttcctagatgttatctttattcctgttgcttaaagaaccagtttaatgcatatagaatttgggttctttgcccagacacccagaggtacatttgataggtacctgattcagagaaggtgaaaattttagattctctatctctctctctccctttttttttttttttttttttgacaggtaaacagaagtaactatcatttggggttgtcaagatatgggtagtagatacctaattccatgaatgccttctctgtgcaagtgctggaaagtaacctcagacttccagactcatcactgagattctttttcttaagcaaaatagtgacgctctgcaggatttctataactgaagttctctaaaagataaatttatattgcattaagagggtagagggtagtatttagagctatgctctcttaaaaagagtaaagaaatttcatgtatatgaaggaacagaaagcatggggataagttttatacaccctagagtggacttttatgataaaaagtaatttacttgttaatcaatttaattcagcaatgggaaaagatctttctcttctttctgaaatcttacacagtgaagggatgaaaatggttatactactggtaatcagagatgttcctattttgttttgatgtgtagattccgtagtacctagtgttgttggatattaagaaaaattctaatccctgttcttgtgggaattgcacaaggagcaatgtaaacacaggtagtggaggtagagatgtgctgtcgtctacttctgctctaacttgagcagccacatctcactcagggtcatcccataggatgtccaggctgtggttggagagaagtggggggatgaagacgtggggtgcaataatgggaggaggatgggctttgggaccagaaggttgtgaatttgagttctggtccatcttcttggcagctgggtcgattagggtggtgaattagctggctgaattacttcacacatcagagcctcactttcctggtttgtaaaatgcagattgtgcccctctcccagggctgccatgagggttagggaggccaggaattaaaacatgtaaaccatgcattacactgcatttcaacccctgcaagggtgatgcagctagctttacctgattttacttggattgtttcttttttttttttgagacggagtctcgctctgtcacccaggctggagtgcagtggtgtgatctcggttcactgcaagctccaccttccgggttcacgccattctcccgcctcagcctcccaagtagctgggactacaggtgcccgccaccatgcctggctaatttttttttttttttttgtatttttagtagagacggagtttcaccgtgttagccaggatagtctcgatctcctgacctcatgatccgcctgcctcggtctcccaaggtgctgggattacaggcgtgagccaccgcgcccggcctggattgtttctttagtgaagaaaagactggggagaagggcacttcttaaagcaatgtcaacagcctctcatatagttaatacatctctatgtggcccttcccagagtgtccttctgtgaggagatccattacaaatacaaaaaattcatgtggccagataagttctatgaccagataagtctggcaaaagctgtttattatacctgcctcttaaagattcacaaggctgaaaagtcctgaaggaatgtaactttctctaacccagaatttcacaaacttatatgaaaacaaaatctttatttagtatgataacctattggcatcaattcatatattatttcagtaaatgttggagactttctgtgtgccacagacaccttcacaggctgcttcagcgaggactgggggagggagagagagatgagtaaaaagattgaaatgatgattccagatcatgagggatacgttgaatataataaatcagtgtgggtattctgggtgagaagtgagagctatttcagatcagatggtcataaaaggcctcttgaagaggtgatatttgagctggaatctgaataattcaagttaactggccttgcaaaaatcttggagggtagaaccttctaggcagagataaaagcaaaggaattagtgttcttgagagcacactttgaggaaagctgttgcaataagagcaaagagcatgtataagaagtatttcaatcaaatttttatatacaaaatatgtagtaaatctttttcgagcattatgtgctagatactatgtgccacagacacagagatgacagttacatttaaagagtagagtagttcggagaagaaagactcaacatctaggggattgagtgataagttgcatggtggaggtagcatgttgtagtggctgaggttagagccagactgcccaagttcaggtcctagatccgccacttacttgataaccttgggcaagctactgacatctgcatgcgaacactggggacattcctagtgcctctcagtggattgttagtatatgcaaagttgttaggacagtgcctggaacataaggaccacatgctaaaattgaagatgatgatgttagagatattcccgtcataaccatcatcgttacagttgtcatcactgtaatcttttagtgccatggtccagctcagatgcctgagtcttcatgccctcctaatgggccccaggtttgcccatcagagtcttacacatgatcacccacaccatgtaggcactattcttacccagcaaagagattaaaacttgcttcatctgttttctacccaatttaactttgttaaccaccctcttaaaaagaagtttcttgaggatttatctctggttgtcttccagtttgggcggcgggtggtgggtggtgatagttggtaatagggttgaggtaggatggaataaatcagaatctgcaatgaaccacttgctggataattagggtagatgagaaccacaggactgtaataaaaatggattatcataacgatgaccctacggtgctaaatgatgcaccatgttccttttgaatcaacaaaagttaaagtcttcctggaatagttttagtacattattgatctctaattcttagaaaattggcaatccatgtatagaataagaaagtctctattgctgcaaatattcataacctgaagaacccattccctaaccattttagataaataagatttttataaaattaaagcaattattaaaattctatttgtgcatggaagaagccatttagctaaccaattatatatctaacttctgtaacagcacttcggaattaatctaattgcatcctattgaaagtcagtcaccttttgcaacatgacaattttatgccaagagaatgaaaatgtcaggtatttccattacagagagtcacattttcccttgattgtttcaggcagaaagaaagcgactcagattaatctgtttagaactattttcagttatctgtatatgtcatacatgctgtcatgttctaagaccactttgttcttggatactgctttccaaaatctatgggattctactcttaaaaaaaaaaaagaatatctcgctttacatatcattttattctggggaagcctaattagcacattaatatcagagagctgacaacctcctacatgttattttaggattccatgtgcaagaccatattattctagttatttgaatggcacgtattctccacagcttgctaacagtagttttgtcttttaaaatttatgtgtttccagtgtttagggtctgctaaggagtgggaggtgaatgtgtcatcataaagaatgttgcagcaaatatattttgcaggatacagccatttccattttttgtagtacaaagatcctatcatcctgaaatcttacattgtagattgtgttatgtgctgctttttatttcagtgagatgaaagtaatattctgaatgagaaaagaattagagtagcatttctcaaatgccagttttgaacctaagtttaaaatagagagatttatcactgaaaagattaagagaaaagaaagaacatttatggaatagggattacactaggtattttcatagaggtatttaattcttgcagtcaaccttcaagatctgtgagatttatccatcacaaataaatgtgttcagattaagtatgtggcctagcaattttgtaaattactgttttttactttgcatttaacatttatgtaattccaagccaatattttgaacctacttttaacagttacataagaccttttagaatgaattttgtatttatcttttttctcctgattttctggccttcatttttctgccaaatattttaaaaaatagtgttttactgtatgtttttagataagccacctcatgccattcttgatataagttgtggttattaaattaatttaataaattaactaattataaacttggccaaagtcacacaggtaagaaatggtaggtccaaatatataaacctaaatatgataaatttccaagtacttgctgttctctttgcaccttgctgccttatggaatcaaggtaaaaataaagaaaaaaatgtaagtgctttgaaagggttcacagctatttgtataactagaatataatctattttgagcaaagagaattgggttatatatcttatttctagattgggccaaaccagtaagtcattttcggtttacaggattcaaatcaacattgtattaacattaatgaaaatgccaactcccattcagagcagatgagcaacaggtgatatcagagaggacctcttagaaaaagcaccttttttttctagtaactgctgattgtgtcctacaaccttctgtgttaattagcttgaagtgcctcaataatgcatcggccaggttgcccagaaccctgcaaacatcttttcatcatccctcatgttgtgggctttccttaataggaaggcagataacttcagatctttatgtctcttagattttatagttttgaaaaagtgacaagtctttttgtcaatagatgcctgggtcttcttatacttctgaagagaggaaaatcaatccaaaagaaaacacaatagattctaattttatggactgttcattaggaagtctggttttgcttaagacaactgtgctggtctagaagttcatagtatttattgatttttcttctttctgatgatcattattgctattttgtagcaatattgatattgtataatataaattctttttattttgctaaagggaagtgcttctgtattcttgaaaactgagaatcaaacagtatttaaagtactttttctggtttatccccagtgtctgtcatagggcatagctctaaagaagttcactcagatatcaagggtgaatgaaaattctctgaaagagaagtacaaattattgtgggtccaactctttaccatacattatagaaggcagagaaaccatgaccacctaaacttgtaggacactgtggggagaagagcctatgaagttgattcctaatgtaggtctgcagtggccatggagctgagaaatcaccgaaatggggaggaggaggagggatctgtctgcctaacttcagtaatattattgccttttcttagataaccctcttcactcttttctgtctcctcaatccttatctagctgtcaaagtctcgttcaaatcctgcctcctccaggaaatcttatctgctcactacaactcaaactgatttgttgacctggccatttacagcatttgtttgaccataccacctggcccttaaggctgcctggcgttttctaataaaagctatcatttttctgaatacagactatttgcttgcttttatttcttagcagctccatgagatacatactatcattgtcccaaatttatattgtctgtctctcccttcacatctattaatatttgctttatgtatttaggtgtgctaatgttaagtgcatatatatttataattattctcttgatgaactgtatcctatactactatataatgaccttctttatctcattttacagtacttaaagtatattttatctgatacaaatatagctaccctgaaagtatagctctcttttgatttcaattttcatggatttttttttttttcatttctttactttccgtctatgtgtccttacaggtgaagcgaatctgttatggacagcaatagttaggtcttgttttttttttgagacggagtctcgctctgtcacccaagctggagtgcagtggcgcaatctaggctctgcaagctccgcctcctgggttgacaccattctcccacctcagcctcctaagtagctgggactacaggcgcccgccaccacgcccagctaattttttgtgtttttagtagagacggagtttcaccgttagccagaatggtctcgatctcctgactttgtgatcctcccgcctcggcctcccaaagtgccgggattacaggcgtgagccaccgtgcccagccaggtcttgtttttttatccattcaaccactgtgtattttttgagtggagaatttaatccatttacattcaaagtaattattgacaggtaaggacttattattgccattatgttcactacttcctggttgctttataaatccttcattctgctcttctctcttgctatcttttttatgattaggtgattttctctgctgctatgccttgattccttatgatttaaattttgagtatcctccttaggttttctttgtggttaccgttaggtttatatacaacatcatctagttataacaggctattttaagttgataacaactcagattgcattaaaaaactacacttttgctctacttcctcccacattttacgcttttgatgccacaatttatatttttatattgtgtatcaacaaattacattgtagctattatttaaataatttatattttaaccttcatactaaagtataagtgatgtatacaccactatcacagtattattctgaatttgactgtgtacttttaccagtaagttttatgctttcatatgttttcatattactaattagcatccttttctttcagcttgaagaactccctttactatttcttataagacaagactagtggtgattaactccctcagcttttgtttgtctgggcaagtcttttatctctccttaattctgaagcacagcttagccaggtacagtattcttggttggtgatttttttctctttcagcactctgaatgtatcatctcactctctcctggcctgtaaggtttctgctgagaagtctactgccagtctttctggaactcccttatatgttatttgcttcttttctcctgctttcatgatcctctttttgtctttgatttttgacagtttgattatagtatgtcttggtgtagtcttgtttggattgaatctgagtgtagattgttggccttcctgtacctggatatttatatctttccctagatttggaaagttttctgcttttacttctttaaataagcttactgagcctttgactctcttcttcaattcagttcaaatatttgctgttttgatgctgtcccataaatcccagaaacttcctttgttccttttcttttttctcctctgtatattttcaaataacctgcctttaatgttacagatttttacttctgcttgagcagttctgctgctgatgctctctattgcatttttcatttaactcattgtatatttcagcttcagaatatttgtttgaattttaaaagatactttcattttttctgttgtttctcattttgatcatttattgttttcttgactttattgaattatttctctgcatttaagtttccttaaaacaattattttgaattctgtgtcagacagttcatatatctccattttggcagggggcagctcctaggagatcttttgtgttcttttggtggtattatgtctctttgtttttcatgttttttgttgctttatgttaataatctgtgcatttgaagaagtaaggacttattccagactttgcatactgggattttctggggaagcctttcaccagtcagctcatccagagatccagagattctgagcaggtcatctggtgtggtcctctggcagacttactactggagcccttggactttgtgcctggatcagcaggtgggtgggcctggtacctgggtctctgggtctgtcgggttggacctggagccttggatcccctgttcattggatctgtaagggtaggtctggagcccgtatcctcagaggttgatctgaagcctggggggctgacctggtcctggggtaggtcttgagtgtgaccttgagaggctgaccacgtactgggatgggcctggtacccaagtctgcagggttggtcctggggtaggtcttgagtgtgagtctacagaggctgaccacgtactgggatgggcctggtacctaagtctgcagggttggtcctggagccttggttcatgggtccagcttgtcagcagggtctgctgggctgggcctggaccctgggtctgctggagcatggggctgcagggactttattctgttcttctctcttgctgtcttttttttatgattaggtggttttctctagtggtatgctttgatttcttactgcagggaccagattggcactgggaaatcttgaagcctatgtccagagttgccagcctggtgcctcagacccagtccaatgacaggttagccagctgaatgacagacccatcccctgtcactgggctgggtctgaagtctggggctgtggtctgaagtctggggctgtgtagggcaatctggccctgggatggtctgaaacccggggtggaacctggggtcatagaggctggcctggtgctgggtggcatggagcctatacctgtagaggctggcctcatgactagggctgcagggccagcttggtagcttgggtgggcatgaagtctggggctaatggggctgttggggttggcctggtggtggggcaggtccagagacagcctgccaggctagcctagagcctggggctgcaggatcctgcctggtgctgggaaagactcggaggctcagtccacagatagttaccatcctggaacctggaacctggaacctcaggggctggcctggcactgggtgggcctggagcctgtatctgcagtcaggaagcagggtctgcaggtgcaagcctgatgacaggctgcaggggatagcctggtgctggcttttattgaggcaagcttcattttgccggcagatccaaagcaaagtctagtgcttatttctctctccttcccccatactgaggataccttgctttaagctgtgctgcctggggttgggagtggggtgatgcaagtgatgtcaaactgtccttcctaccttcttcaatgctacatccaggtgctgtaatctctcacttggtttccttagttcttgtgaaaggtgtttttctatgtggatggtagttcagattgatatttctcttgggtgggggtgatgtgtactggaaagtcctattcctccatttctttatatctgtctcaaattgtcccagatttacagatgaagaaactaaagttcagcaaacttgaatatcttgccaatgacacaaaactatttagtagagccaaggttcaaacttcagtctttgtgaattcagaggttgcttgcttccactgtgcagatgtggaatatcaaactagtctttagattctgcgagatttttctttctctcttatgttctaagaaatgggaggtagaaaagaacagtgatgggtgagggagaactgtccttgagtctgcaccctccacaggaattttgttgctggggaaggttggggaggggctgtggagagagggtccttagtgcccagctgaaagtatttttcccactggagtggttccagatttaccaaactgccatgaaacttgcaaccaaggtgtgacactacccctggctacaattgtctaccgttgccaggcctttggaaactgctgcttttgccaccagggcctttgtgcaaaagggcactttgctttctgtccctgtggccatcaccagcttcccattgatagctcctgtctataactgttggggtttaccatccaacaagcggactctatatcagctctcttcacctgtgttgtcttgtatgttgctgtgtgtctaaggtgtgataatttgccctttcttcacttgtttttcatagctgtctaatttatattgttttgagtaccaggactgtgcagtgggctccagaactttctccaaagggaatctgttgccatttaactggggctgttctagtgtgtgctacccaagaatgcccctttatatgctttttaaaaatcttaattcaaaaatacattttttgtgaaaaatacaaaaaagaataaaataattaccacccaaagacaacttgctaaatttagtatatattattccaacattttctacatttatgtatatatattacataaagaaaacatactttttaagtaaaatggcttgttttgtacctatagcttagtgtcctgactttctctcgaaaccatctttcataccattaaatattttccatatcgtttagtagtaaaattgttcagctaatcctctattaaggttgtttctcacctctctgatgttgtaaacagttctgtggtaagagttgatgtagctaattctttgtgcaccttcttaaatattgtacttttctcccctttctggtttattttttaagtaatatgtataaatgagggaagtaactaagttgctctccctactgatccacagggtcatgatttctttagggtacatttctagtattttaattgttggatcaaaaagtatgcaaaattttaagtcatttgcattttagaaaggttatgtaagtttactcttttaccaataactgaacacctttgtggacaatggatattttcatttcagattttgtcaacttcataggtgaaaaacgaatctcatttttttaacttatatttttaaattgctagtgaagttgaacgtcttttttatttacaaattggtcatttggatgtttcttattttgtaaattgcctgtttgttttttcctgttttttaccattgatgtgtttatgtgttcctattgatttgtaagagttctctaggggaggggacttggatttaagaatattaacaatttgggtgtcataaatattagttactccccccagttgttttgtttttattttatttgtgatattttaaaatattattcaaggttacaaaagatgtaatagttaaaaatgaaaagtataatcatgctgttttcttattttctacctaacagcattagaaaatatacaattctttatatttttgttttagcaatagaaaatttctatgcacttcttgatagaaaagatgtgaatttgacttaccctttcccatttgcctcttatcctattaatatttgatattttaaaaattctggttatttatccttatgacttgaagtaactcacctaattctattttgtactccattatcattcagcggcatctcttgactgtctactttataaaatgagaatattagcacctttatcccttcttaccccctcctccgcacccgcagactgagcccagagcatttccaggagtttcttcttcctccataatctacacaggacaggctttcatctccactgcagctctttcgctggttcatctcccagctggctctcatctgcttcctgtcgttccagcccgtctcttccctgttacaagttatcctccttgtacctccgtctttttatttaaatggttctctaaagatgaaaggcaaatgtgcctagcttgccatcttgagctgaacattgcagtgctttgtatatatagaaattttaaaatttttatgtggtgaaacctgcaagtgattccttttggtttccacctttgccgccatgtttagaaagtctttctccaatttaagattatgttttctttagtacttttgtgaattacttcttactttgaaatctttgttcatttctagaatttattttggtgggtagaatagtttagagattcatcttttgttcaaatggttagccaactactcagtatcatttattaaataatacaaagttttgaagtactgaattcttacatatatttgtgcccgttgctgagctttgcttctttaacctgtctctgatgcacactggtgccaaacttttaattattgccatttcagaattttaatatctggagggcaggtcttcaccaccatcccccgacatcattgttctttatcaaaatgtttttagctgatgttgtattctctcttccctgctgcaaaaggagtttactgtagtatacacgtttgaatgaggctgccttggtcagcccacgtcttagctcttcgtcagtatttctttctagctaggcagaaagagtaaaacttctgtgtaatactagttccctgttccacccaggttttgtattcacttgcttttaggtctaggactggagaatgcagtacatgccaataattctagtcttctctgatctgtgaacatataccttcactgacatttgtgtagttacttggagccaaaaggaaaattgtcacttagccagatttcactctcaacatttcacgtctccttccactacctgacacctgctagtacctcccagtcacccaatctgatctcctaatctctggcatctgacccagcctccatcactgcctccctcaggaatgtgtagatggccttcaggccatttcgtcaggctccctctttcccaccctacctgccagtctatccttcgcctgcctgccttcctttccgggtgccagcacaaagtttgtgacctcaggtgcctttgtgctcaggcagaattaggcacctagcaatttacgaaacactcatggctgggtgcagtggctgacgcctgtaattgcaacactttgggaggccgaggcaggtggatcacgaggtcaggagttccagaccagcctgagcaacatggtgaaaccccgtctctactaaaaatacaaaaattagctgggggtagaggtgcgtgcctatactcccagctactcaggaagccgaggcaggagaaatcgcttgaacccgggaggccgaggttgcagtgacctgagatcgtgccactgcactccagcctgggcaacagagcgagactccgtctcaaaaaaagaaaaaaaaaaaaagaaatacttatttaattatgcttacctagaaacattgcagcatcaacataactggctccagccagaagaatgagtacttgtttcctggcgggaaggatgccaagaaacctatgcttcggagtctctgtgggcacagagcctgtgtttgaggcagatggaatttcatccgtcggaaatttaccgtcattgactctttcctaaacatacttagagctaactgaaaaatggtcacctttgcacttttgcacaaatctctatcaaaagccagggagaacagaaaatctcttttactacttttttattttcctttttttttggaaacagggtcttgctctgtcgcccaggctgaagtgagatggcgccattttggctcactgcagctgccgcctcccgagtcctagcgatccacctgcctcggcctcccaagcagctgggactacaggctaaatttttttttttgtagacacggggtttcaccacgttgcccaagctggtctggaactctgggctcaagcgatccgcccacctcggcctcgcagcgtactaggattgcaggggtgagccaccatgcctggcctactttttccttttacgtttgctgatttttgtcccatccttctttttgattctgcaacaaaaaaattaaaatgttaaatattaaatatcttttgtagaagatactttattaaaattctatttcagtgctatcaagtggaaaaataaatgcaagtcacatttataattgtaaattttctagtagccatattaaaaatagctttaaaaacccaggtgaaattaattttaacatttaagctagtgtattcaaaagaatgtatcagcgtgtaatcaatcttaaaaaatattgagatgccttacattcttttttttttccatttgatatctgatgtgtattttatacttccagtacatctcaatttgggccagccacatctcaagtactcaatagctacatatgaaatcactttacctccaaattctgagtgattttactagtgactttatattggaaataaccacatctagaagttcttatctagggatgcatgttcagaatcacctggaagctttttctaaatatgcattcctgcctgtaccctcactagatctgttaaggtaaaaatctctgctctgtgtgagcctgggcatgtgtgtcttgagaaaggtacataggtgatattgacaagtacatttaattaaaaaccactaagatgatccagcttcttcagtctacctatgactaaacacgtcctgtgtgatcaaacagctttcccacagagagtaatgatacagacctcagtcttccattcacaaatctggtgtcctttttgcctcatcatttctaacatataggataagaatgtagactaatattatacacagatttgttcaataacaagagtcagcaacaaaagggagtttcaagttactctttagattatcaggaaatttaatgtaaaatatcctacctgcacatgtgtgcacgagcacgtgtgcacacacacacacattgtctaaatagtcttgttaattgaagtttcattgtgatgggcatgaccgtgtagattttatatgcatttccatgttcttgataccttttagactcacctcatagattatacttttctgaaactgcttttaaaaatctatatcaaaatagataccaagggctattataattattttagtatatctctggacatcataaccaaatacaaaagttcttcagcctgtcagttttcaaagtgtcagctctggatttttcaggttaaaatttcatatctttaataacaaggctgccagatatcagcaggcagtgtggttgactactctgtaatttaatgggagttcttcataggtgagtcacagtggctttcttctctttctttcacatggtgctgacaaggacagcacacgtgctatactgaaagatagtaagtctcagaaaggtcatccaaaggtaatttgtggattatttttgatgagttggagatatggagaaaaatgtttgctctttaacacttaattttgtatgaagtgaccaaacttagattatctagttttatttcatgcaagtgaatttaacaattaaatattttcatagttctttaatccgtatgcttattaaaaatcaacttaagtctacaaaagtcacaagtaattaacaagcctgttaaataaaataatgatatccataatagcctacaaataactactagaatttttaaaaagcattttaaaggtccaaaacgtttaaacaggttatttagcagtaatcaggatggttatatgacactcacttgaaagaggcttcagtttagattatctagactaactgtctttttacaaatggaaaattcagagagatccaaagagatgaagggattaactccactcacatagagattcccttccagtgctagtttgccactgtcttctgactcacttcagttggctttttttttttttatcagctatgatgactttcttttgctagaatgtaatatcatgttaaggtatagtgatttgcttataataaaatgatttaaaatattttgacacatgtctattggacatatcaatacaacagaacaaagacaatagccccatgacttcagtgcttcagagttccatgtgtgtttccttccgtgtgtctaacataggacattaaagagcatgatcatttcttcaaaaataggttccttcaagctgagtacaagatccaaattttaaaaataccttttgtggaaaatactaaaacttggaaccacaaccttgtttctctcttttaacgtaattgctcacttcatgaaaaaaaaatcccctttggacaaatggatgtaattgtatatgtaatgcactgggaagtatgagttactattgattaacttgtattaaatatctgagaaaaaggtatgtattttatttgtaattttaagttgacgagatgataaatagaaaaccccttatttggagttccctgatgtattcttagtggtcaagacccttaaaacaaaaaatgtgatttctcgttttacattctcctcctttctagtttttttttccttcttatgcagaacagagattttattgtagaattaaaactgataaacctgatccctcagctctgtgctattttgtttaccccatgaggagttgctccccataaacctgagagtttgttagaaggtaccttgttcagaagattatcaggtttaagcaattgccattcaagagagtaaagaagaactagtctggaagctggcaagaaaaaaaaagttgttatttctaagtcaatgtttgtagaacaattgcctggttaggcaatgagacagtagtgtttaatacaattgagctgtgatgtataatatgagtagtcatacactcttttgtaagagtcttggattgatatttttgttatactttgcaatcaaataaaggaggctgtttgcacatatcctgaaaacgatttgataactatatagtgattatttctcggtaatttttgaaggtctactaaccaaaaaattctaataaaattcactcttatgaaattaaagattaagtcacaaaaatacaactgtttagataaatattcaagcactgacaggcatatagcacctcagttctgtttgtttgctggccattatgtttttaccagcttttgttttaaaagtctcatctttctccttgattaaattaaatgaacatcctttcctgttactccaaaggattccttataatttttttatagcacctttgattttagactgagggcttttagatagacttaaatagattcttctactgtatgtttctgaaatattggcccctgtactttaccaacatacatttcactttataaagttaatgtaagggcttttcagtgactccaggcaaacctcaaacaatctctgatttgcaaaaagatcaagatgcctctggaaataacacacaacccagtgttgttattattatttttttgcaagacctaactagagaagtgatcattatactgtatattctttaatcttgatgtttttaaagaagtttaagtgttgtatcctttaagcaattaagttcagttcaaaagacagaataaatacaaagctctttaaaaaaaaaaaaaacccttaagagaccacattgtggtaagtatttcagcctctggattttgataaactagaaagctttattttgaggagtcattaacttgcaatttggcccagatcactctgtaaggtcatggtagcttcagaccccttatctctaactagcctgcccgctgggacagaaagtgtgttccaagagaaagagcaagatctctatgattagattgagtctacaggggactgagagccctaagaaaacttcagattttaagaaatcttcaaagagaaaagagacttaacagatccagatgagccatgggaacagtgaagtgcttggtgcatgtatatataagttctcaatagagctgtttcaaccactagtccaaattcaacttctcaagcctggtagagtcaaatttctggcacttggcagcagagagtttatagaatgccttgatggaatcaagtagtaacctgtcttccttgtcttccttttgcttccaaacttatgacttggatttttttttttttttaatgctctttccagccctagtagtgacagcattttccaaaatgttactcaaaacctctcaaatagcagaggcagtaccaacacatcctggcatctagcctacggtcgtgcttcaggaatacactgactgccttggtgatggccaaatgccagttcttatagttaagttgtggcttggacatgtggacccattcctttctgtaatcctatcatgatcccctgctttctttcttccctaccagaatctaagctcctggaaagcaaatgctatgacttttatctcttgtattcccacagccatgttggctagaaatatggtggatacacaaagaaagttagttgaaagaacaaatccaactatccaagaggttctgaatacccactggccccaccaccaacctctgctcttcttcttcttttttttttttttttgatatggagtcttgttctgtcgcccaggctggagagcagtggtgtgatctcggctcactgcaatatccgtctcctggattcaagcgattctcctgcctctaccttccaagtagcagtgattacaggcgtgtgccaccatgcctggctactttttgtatttttagtagagacgggggttcaccatgttgcccaggnnnnnnnnnnnnnnnnnnnnnnnnnnnnnnnnnnnnnnnnnnnnnnnnnnnnnnnnnnnnnnnnnnnnnnnnnnnnnnnnnnnnnnnnnnnnnnnnnnnnnnnnnnnnnnnnnnnnnnnnnnnnnnnnnnnnnnnnnnnnnnnnnnnnnnnnnnnnnnnnnnnnnnnnnnnnnnnnnnnnnnnnnnnnnnnnnnnnnnnnnnnnnnnnnnnnnnnnnnnnnnnnnnnnnnnnnnnnnnnnnnnnnnnnnnnnnnnnnnnnnnnnnnnnnnnnnnnnnnnnnnnnnnnnnnnnnnnnnnnnnnnnnnnnnnnnnnnnnnnnnnnnnnnnnnnnnnnnnnnnnnnnnnnnnnnnnnnnnnnnnnnnnnnnnnnnnnnnnnnnnnnnnnnnnnnnnnnnnnnnnnnnnnnnnnnnnnnnnnnnnnnnnnnnnnnnnnnnnnnnnnnnnnnnnnnnnnnnnnnnnnnnnncctgggcaacatggtgaaaccccttctctctctaaaaataaaaaaataaaaataaagaaatcagccgggcatggcagcatgggcctgtagtcccagctacttgggaggctgaggtgggaggatggcttgagcctgaaaagcagatgttgcagtgagctgcgatcacacactccagcctgggtgacagagcaagactctgtctaaaaaaaagcccacaagctggctttaaagtgaactaataatgatgtctatgttatgattctatatgatatttgaatatgttcacccttttctcttttaatattgtttcaactactgatttactttagcaaacactttcttcattaaaagtgcaaaggtaaacttaaaccatccaaataatcagccaaatcagtcgaatctacatgaaatatacaacaatctaaatgcttaaaatagataagtacagtagtggagggcgtaatgtgttactgggcttttgacatcaaggacgtctgtgttcgaatcctgactttgtcagttgttagtaccagttgtattgacttagataaatcatttcacctttccaagtctcagtgttttcttttataaaaactatggttgtcaggaggattttgtgagataattatatatgaaagaacctactaggatgtattctttagtaaacattcagtatttggctctctatttggcaactgagtggtggttgtgttccccaggtgtgagggttcctgggctgggctggggctactgtcttgtagtttcagtaatttggtttcttgtgtactattcatatatatatatatatatatatatttttttttttttttttttttttggagacggagtctcactcttgtcccccaggctggagtgcaatggcgcaatctcggctcactgcaacctctgcctcccagcttcaagtgattctcctgtctcagcctcccgagtagctgggactacaggtacctgccaccacgcctggctaatttttgtatttttagtagagacgaggtttcaccatgttggccaggctgatcttgaactcctgacctcgggtgatccgcctgcctcggcctcccaaagtgctgggattacaggtgtgagccaccatgcctggcccttattatatatttttatatactttagaaaatttgatctgcggaaaatctggttcttgttttttggccacattatcagatcagtcactcatctactgtaagtacattaaaaagaatacatggtcactttgcccagttaaccagagaatggtgccattaagttaaaaaatgcatatacatgtataggcatgatcctcatatagattagttttgttagctgcacagtcacagatcaaatcctgagttattacccttcttacagaagggtgtgtcgcttgttcatggtggggacaaggttgtcagtgaggatagcttgatagtaataaactattactaccattggaagaacatttcaaaatacaatattatgcatcctacttaggttattttcacttcatatggtaatagtccattaatttaccctaataatatttagtagattttgacatctactagaacataaggttgaagtgaaaagcatgttttagtttgtgcattttaaaacaattttctacgaaagaaaaccaaaattaccttccatagctttcttatttaaattggacttaatatttctattgtttttaagattcaactcttggaatcttctacatttctttgcctaagtaataggggatggtttatgttttttgccattcataatttttcttaaaccttcatacccacatttagccatatgcgctttaagacacacagtgaagatgaaatttaatacacatcaaacttctgtgcagacttggtgagaaacagatattttgcagcctgctttcactctgtgagtcattaaggagtgggttgataaacttgcattgcaaccttgcttatagaagattgtgcctattgtaagatactccctataaagccaaaagataaaaaaatgctaagggtactgacaattgtttataaaatacagtcataaagacatcccgctccagagagttctctgattaaacttcacaataactgtaatttctctgcctgaatcactttgttaaattttgtcttggcttctggagacagggtagggagacagattaaatttcaataccttatgctattcattgggcttgggagagtttcttcagcataaatgataataaagatagattagtgattctggtttatcctctaatcttagcatagacattttctgtagattagaagtcatttcatttatgaaccaaataaggcttctgatataaaaagaaaaatgaatcttactcagttccctaaggcttagaaaagattgctggaatttaggagttgggtaaatggttttactttagctactaatccaattgaaaaaacgtgagacgattttctgaaaagctaaaaagctcttatagtaaatttgagaggatttttaaattatggagaacaagatagtattgcccttacctaaaattctccctcaatattttgtttcctttgctttggaaacagcatccaagcagggccactgagaagggtgtgtgggggtgggtgttttattgacagttgtttgaaggaaattatgcacaggtacctaaaaagagcaactcaggcaagtttcccagccacttagatttcctgtttctttaagttaagcattgctattcacattgtgttgactgtagaaggattgatagtgtccagtacaaataataatagtaaaatagaatttctgcttagagtttgtggtaaatatcaaaatatcttagtgataagcacatgtattcttttaaattttgtcagttgcccagtgcttccattcattcatcacttgtttattttattcaaccagcatttattgaccccctgctggttctgggtttcctctcatactgtgctagatgcctggtatgcaaagataaatgagtcatggtctctcccctcaagcagtcaccaactactaaattcttggtcattttagttgttttcttttttcttaaaaaaattttttttttcaacaggtttttgggtacaagtggtgtttgtttacatgaataagttctttagtggtgatttccaagattttggtgcacctatcatctgagcaatgtcactgtagccaatgtgtagtcttttatccctctcctccctcccagtctttcccgagtccccaaagtccattatatcattcttatgcttttgtgtcctcttagcttagctctcacttatgagtgagagcatatgatgtttggctttccattcctgagttacttcacttacttaccctccagttgcatccaggttgctgcaaatgccattatttcattcctttttatgtctgagtagtgttccatggtgtgtgtgtgtgtgtgtatacatacacatacataccacggtttctttatccactcgttgattgatgggcatttgggctggttccatgtttttgcaattgcgaattgtgctgctataaatatgtgtgcaggtatctttttctataatgacttcttttcctctgggtacatacccaggtgtgggattgctggatcaaatggtagttctacttttagttctttaaggaatctccacactgttttccacagtggttgtactagtttacattcccaccaacagagtaaaagtgttcccttttcaccacatccatgccaatatctattattgtttgatttttttgattacggtaattcttgcaggaataaggtggtatcacattgtggttttgatttgcatttccctcataattagtgatatcgagcattttttcattttttttggccatttgtgtatcttcttttgagaattgtctgttcgtttccttagcctactttttaatgggattgtttgtttttttcttgctgatttgtgtgagttccttgtagattctggatattagtcctttgttggatgtatagattgtgaagattttctcccactctgtgggttgtctgtttactctgctaattatttcttttgctgtgcagaagctttttagttcaattaagtcctgtgtatttatctttgtttttgttgcatttgcttttgggtccttagtcatgaagtctttgcctaacaaagctattgtctagaaagttttcccagggttatcttctagaatttttgtggttttggatcttagatttaagtctttgatctatcttgagttgatttttgtataaggtgagagatgaggaaccagcttcattcttttacatgtgatttgccatttagcaccatttgttgaatacagtgtcctttccccactttatgtttttgtttgctttgttgaagatcagttgactgtaagtatttggctttatttctgggttttctattctgttctgttgttctatatgcctatttttataccagtatcattgctgttttggtgactgtgatctcatggtatagtttgaagttgggaaatgtaatacctccagatttgttcttttgcttagtcttgcattggctatgcgagctcttttttggttttatttcttttttttaaaaaattattattatactttaagttttagggtacatgtgcacaatgtgcaggttagttacatacgtatacatgtgacatgctggtgcgctgcacccattaactcgtcatctagcattaggtatatcttccagtgctatccctcccccctccccccaccccacaacagtccccagagtgtgatgttccccttcctgtgtccacgtgttctcattgttcagttcccacctatgagtgagaatatgcggtgtttggtttcttgttcttgcgatggtttactgagaatgataatttccaacttcatccatgtccctacaaaggacgtgaactcatcattttttatggctgcatagtactccatggtgtatatgtgctacattttcttaatccagtctatcattgttggacatttgggttggttccaagtctttgctattgtggatagtgccgcaataaacatacgtgtgcatgtgtctttatagcagcatgatttatagtcctttgggtatatacccagtaatgggatggctgggtcaaatggtatttctagttctagatccctgaggaatcgccacactgacttccacaatggttgaactagtttacagtcccaccaacagtgtaaaagtgttcctatttctccacatcctctccagcacctgttgtttcctgactttttaatgatcgccattctaactggtgtgagatgatatctcattgtggttttgatttgcatttctctgatggccagtgatggtgagcattttttcatttgtttcttggctgcataaatgtcttctattatttcaggagatctactagatgctggagttacagcagaagaaagacaggaagagtttcttcccttatggagttattctctagcctaggaataaaagtcaacatgaataaaatggagaagcaatcaatgctgagctgaatttttcaaatagagtagagctattaatcatattaggtcagagatgtaattctttggtgagagactaataaatgaaataaaattataggtctttttgagactaattgaaattatggaacaaccgatagaataaaactacattctaaaattgtagtttccagattcagacttagaacattccttaattaacttagcatttgatttatagagaactttaatatttcaatagtattatctatcaaatagttaatgaactattttaactttctttgagaaagttaaaaggcagatatctccagttttaacattcggctctgactcaaattttggttaagttttgctgtcacatctagactttattacataaacaaagatttaaattaattacagttacttcaatgggatatataattcagatttattcaactttccccattctttaattactactggtcagagattgttcttgtgagagatacactattttagcatgactcagaaaccttagtaacaaagtgaacattttaaaagcatacaaaatacaagcccgaattcgattcagaaggcataaaattaagctattggatgctgtagtttctcagtgctggtgtgactctctgcccctgcctcatgatagaactaggaaccataacagttcactgagtcatgctaggccatggtatcagcgcgtgcttggcagaccctcagtaaacctttgtgtgagtgggggcatttgttgcacagtgatgatctcaacattactttaataatctataccacatatttatgcttggtattggtttgttttaaaatgcaatttttaatttaattttattattattattttttgagatggagtctcgctctgacccccaggctggagtgcaatgacgtgatgtcggctcactgcaacctctacctcttgggttctaggattctcctgcctcagtctcctgagtagctaggattacaggtgtccaccaccatgtccgactaattgttgtatttttagtagaggcagggttttgccatgttggccaggctggtcttgaactccaaaatcagctattctttaaaaattatgcatttgaaacaatgaagatttagccattctaaacacttctttagaaactttatgcctgcccttccttaatcgattacatttagatggaacttttgtataaagtgttctcctacacatgatctcatttgatcttcttgacagttctgtgactgatattggacacttattattatccccattttatcaatgagttaattgctatttacctgcgattatatagctaattaatggaaggcattggctgtacaatgggatttgtgactcccactttacagctgagctcaattctttctaccattgacctgcaacgatgttttaaataaaatgactactaaggttagatgttttaaataaaatgactattaaggttagatgttttaaataaaatgactactaaggttagactgctaaggttagaggttagactgctagtttctgccaatggatcatttttgccaataataggataattttttttcacaataagaatcctaaaaaaaaatttcatcctagcctcagcacttctctacattaattctaggaaacacttgtacttagatggagcttcctaaggaccagcaatctttttaacaaaagatgagcccttcaaaagctgcctgataagtgagtgcaagaattataaccattgatacacactgtagtcatcaaaaagtcagatcacacagtctattctgcataggactccattcattgccttttaaatgcaataaacttcccctccctttttcacaccatatcctgcctttttctaacctatattaatgattcaatacatatggtgaataaattaagtgatagagtttttttaattagcaagatttttatatagcaagatataacctgagttatacctgtatttcactttgatctaagagaagcaaatcatactagctcttatataaaaactctgtaatggtagcataactattcagtaatgttactaaatgaaaaagaactgcacaatgcattttgttatgcatattttctttaggaattccttcactcttggaataaacttaactcttttccataaatgagacccccaccccccgcagtccaaaatttgtcaagctgaatgatcactaaaatcacctaaagaacatttttaatgttatttttctcaagctttttataactaaaattttcttcccatatacaaaaagctgaaagactagtacaatgaacattcatacaagtacctcctaaattcaatagctgttaatattttaacaaatttggtttctctctctgcctttctctccctctgtgtgtatatacatagacctatctgtataagtcttggcttgatttgagtttaggtaaaacattattgataaaaatacttcttcattgatgtgtgtacttcatattgcattacatcaggtggcaaatgacgtcaggttgtttcatcgctggtaattgtatttaatcatttgttcatggtggtaagtagcagatctctttttttttgtaaataacaaacgtgtctggatggtagtttggtactatgtgaatatcctgttgctaacatttcacctaaaggaaaccatccttttgtccctaccagaatctattgttccatcagactctgttgttacatctacattgattagctggccttcttctgtaaaggtgagcatttctttatcaactgtgggtcgactacagtttcttctaaaaagttagggtaatttgtaatccttcccctttaccacgtttcgagtagatctcaccatatcgaatttttcccattattttttcagggctacttttctttctgacacaactaaatttgctcaccttccaatttcctgcctcagaccccaaatcaaccatttcttcaaggaacctcagttctttttagtgaaggatggtatgtataaatcaagctctaagtgttaggcatacctattgtacttgtatctttgcttcttgaccttttcagtggacagtgcaaggaaatatgtgtatttctcttaatcatgagttcatgttagtatttgtaatttaaatttaacattaattttaaaaattatatttgtatatcacacttaaaacttgcaatatatttatttgattcatatatacatatatagttttgaattacaataaaattctgaacgaagtttaagatttctttgcaattctttctgtccctggggagtttttaaaaatgcaaatattggccgggcgcggtggctcacgcctgtaatcccagcactttgggaggccaaggcgggcgaatcacgaggtcaggagatccagaccatcctggctaacacggtgaaaccccgtctctactaaaaattaaaaaaaaaattagccaggcgtggtggcgcgcgcctgtagtcccagctactcgggaggctgaggcaggagaatggtgtgaacccgggaggcggagcttgcagtgagccgaaattgtgccactgcactctagcctggacgacagagcgagactctgtctcaaaaaataataataataataataataataataataattataattatatctgtgcccacttccccaagatcttctgaattagaatcctggagatagaattttgtcagattgtaggtttgtatttttaaaataaccaatccatgatctcctgccctagtcagcctcaggactgctggaatatgtgaaatctgttttactttgggtcatatctctcaatcctccctcccctcttttttccttcttagacatttttataattttgttataatgtaattacagaattactgggcacagggagaaatgtttaaggaaatgggaaaagggttgactgggaagtaaaaagaaaaatcaagaatttgcaggaagatggtatagggagcttagaagctactggcatgaacagtaacttttcataggctatcattatcctcaatatcttccttacagttcttcagaagattttaaacagtaatcctgttttttaaaacaggatttaaaacattatttaataatggcctagcatttattgcatatttagcattgccaggcactcaaagtattttatgtagtgcctcatttaatccttgcaggaaccttattgtgctcatatattaatattccaattttgtaaatgaggaaactgacttaaatatatgtactctgcttaatgagctactttctaaggaaaacacaagttttatctttgccacaggttgggttacccaggaagcgcactctgagattgagatttggatgccttatgttgttagagatacctgacagatctaacagaattgatctctggggatcaatacctttggaagggaggagatgcaaccacaaccactcagtgaagctgagctatgaagtggttctctaccaagtcctgaaccaaccccacagagagctctggagctagggtagttgttcaaagtccttccaatttggagcaagaggactggcctttttacctctgcattgacccatcgctgtgtgcagactgcccctggaaggaggcttgatcttggatggggaccctcttctgctggcactctctgcagccaggggaataagttttttaatcctgaaagggcttctggggtagaactgatcgctgatcacagtgtccaccacatctccagtaaatttgctataatttcttcaaaacaaattttcttgataaagactttttccctattggctattcttttcttatttttcccattgaagaatatatatatttagaggcatttgctcttatgtcattcaccataaactcaaagtcttttttaacccagttgtaccagcttttaactccgtgccttatattacatcggataaaccaaaatatttttatgcagtaacttgctgttttttttaaacatcaggcgtttagcatctccagtcctcaacattttactctgcttgtctttacagccattcttgagaaggttctcaaagaggtcaatgcaagagaaagtcttcatattaatccatgcttaggatctcctcaatttcaaccccttctttgttaaagcgtcctctttgacactcagcatacatccttcatcccgtgattttctggtggagaaaattactcactctcagcttgctggctgactgtcccaactgtctgtcttctgtgtgaacttggaggcagaagggctgtgtgtgctatcactccctggtgtagagaaacacgtccacctcctcctgcctctggtgtacctggtcccttgtatatgggattatgtgctctcagcataagaaatgcctgatttttccatttaaatgaggtgaggctatgttacaaatgcactatttgttctcttcttcctttgggagtatttctggtcttcatttttattggaagacctcgaaatactttaaatatgtttgttctatagtttttaaaaaataaatcatttctgagtatgttgaaactcagtacccagcaacataattttctttggttaataatttttctaaactggaaatgaaatgccttaaaattatgcatttgtcaaatatgctttaatatgtggttaaaagccaatctaataaggaaaaataacctaaaaattagtccaaccattccttttaattccttgcttccaatttaccatgtatatctaccactttggagagaaaaactgttaatttaaccttaatttttaatttaatttaaaaattttaaaatgtaactccatttaaagaagtatcttgaggaagattgaacctgggagcaggtaagtaggagagatcactaaagagcaaagtgtaaggtagagcatttgtttccttcttttttgtttgtttgtttttgtttttgttttgagacagtgtctcgctctgtcgcccaggctggagtgcagtgactcgatcttggctcactgcaagctccgcctcccaggttcacgccattctcctgcctcagcctccccagtagctgggactacaggcacccacgaccacacctggctaattttttttatttttagtagagacggggtttcaccgtgttagccaagatggtctcgatctcctgacctcatgatccacccacttcggcctcccaaagtgttgggattacaggcctgagccaacactcctggcctccttcttttttataaggatgtgtgcctcttcacatagagtgctgtgtaggacttgaacttctatctcatgaatgtctcatgttggcggaggtcatgcagcatgattctcattgcttttaagtgatggataattgagtgattaataattgatttcactgcattctgtgttttttgcaccttttaaaaaaaatcgcttaagctagggtttttgtttctgttttttaaatgctaccccaagtttggttgtgttctcaagtgaaaaacattgctagctatgccgtgtgtgaactttcagcctagtcattttgtggccataaatattgtttctatgagcctcttttcagctgtgctagtcatgtgttttctgtttgttccttaaattatgtaaaatgacccctttggcagccaacaaattttatagcttactatgataaagagcttccttatggaaaaaatattcaagttatataaaatgttttctagcaggtcaatttttttctgaataaatagttttaaaaacaaatttaacaggaagcttaacaattttttgaaaatttgtacaagcagtgctcaatgtagggaataaggaaaaccaagagatgagaaaaattaacacccaaaagctcatcaccagagaaaactgcttttactctctcttcttctagtcatttctatgccccattattatttttgcatatttgaggtgatgtggtgtaaacagtatgtatattcaatgtgtatattctacttcttcaaactaatattatatataaagattttctacaaaaattattttttgaacgttttataattatatactattcagttgtgttaagttcagttagcataatttttctaactgttctcattaagggcattttgtttgtttctagtagattggctagtatacaggctgcagtgagcatttctgcataatgtctcttctgtaattagaattgtgtccctagaatatattcacaggtctgaaattttgcagtcaggaggaatgaatgcttttaaagattttgatactcacagccagatggctttacaaaaaaaactctaccaacattaaattgtttttactttttttccccgcctaggagggtctaagatctttgtgaccctaaaaaggttaagagccactggtatgtttatgaaaaacagattttatgcttcttgaggtcatcactgccttttaacttccaggaaccctaccagtaagcataccctgaagtagatgtgcaagaaatttgttgaaaataatgatcttagtgagatctgcatgtgaccaaaattgaggatgcctttcaggaatactaacatgccttaggcagtggaaagggtggccaactcctctttggtgtcaatttgaaaaccttattttatttacttcatattgtcagtggcagacaacagatttttgaagaccattttgtgtttttgcaaaatcacaatagcaagcacggtagctcagtttaatggtcctatgtgccaaagtgactagctgaaaataaagtatttcatttttatctgtagcagtcaagtcacatgagatgagtatatcatttcctgcatattacaatttattacatcttaatattcacctaccctagtgggcgtcatagtaagtttttacttctattacagtagcctttcctgagctgctttattatgaattctagttagtagtattttattggtttgaaaataaaggaaatttttattgaaataaatgtattgaaattaacagtgattctaaggaatatatttgttttagcatttaaatagtctacaaagataactatcaatttatttagctagaagttccctagaaattctagttaaggatatgaaaagcatggatgcctccctcgacctagagagagtataatagttaagaacatggaatctgtagccagagaccttggatttgaatcctacctttactgcctccttggagcacggcttttatcaagttacttaaactctgtgcctctgatttcttaactgtaaaatggggtaatagtggtatctagctcaaagagttgttgcaggaattaaaagagatacgtatgatgcaggcagaatcatgcttgtttcattgtatgggttcttctaccttctcctcatcgtattatcgtagtctttgtagtcgtcttcatgatggaagtcagtattcaatgaaatactttctctgataaattgatttactactttttttttcatttttatctccatttttcttggtaagcctttggaggttctgttccaactttgacaatgctttgactgacacattggcaggctgtcttaagtgtgtgctatagtaacaacatgcttcctttttcatttatttgtagataccaggataaatgtgctgcttaccttcattataccaggtaaaagaagggaaccttttcaatagaaaacaaaaaacctgtatgacttagggtcatcagaagagtatggcaaaataaaactgagatattcagtgagacttgccagtgtagtcttccaataaattattgcatattatttgccagagcttcaccttttgttgcaaacagatagcaaatttcagttgcaccacttcagcagcttatgttcatcaactgaggttggttggaatgtgtcagaccagctaaatttaagcatatgttattagcttctttcagttaatgggtagagttgcttcctgttgcttaactactgctatgtttccttctctcaaagtgccaaaaagtttttgaaataaaatgattattttaatggtttggtattgtgaacatggttatggtaaaattagaatattgcttctttcatctaaaaggtggtaggtagcaagatgaagaaatggaaatagaaagtaagggaaagttaaagttaactatcatatttttaatgttttaatatgagtataatctgtttactatataaatcagaaattaaattaggaaaacattccatattattctgtatgaaagtagtgttttgatatgtcactcctaatcctcacttgggtttcatagtgaacattttcatgtgtcctagaaaacagactgttggttgtatttctggataagtactctgtgaggggttttctccctttctctcactgatacctcttacattatgggaggggagaaaaatggaactctggtcttatatataatatagttagcatgtcctgggaaatatagtaaattattctgtgatagtgtaattatcttctgctgtctttatggaaccaggcatttgataaatttttggttagagtagaatatcagcaaagctataggaataggctcaattgtgaataatttagttttcctccatagccacagcactacttttgctcacaaaaaggcaagagtattcatgagcgatagtttgaacatctaaaaattcacagtagtacctcagttggaacagtctgcttaacataggatgaaaagcactttagtccttacttatgggacagactgatttaattctttgtatcaaatttttaaaaatgtttttccctttatttcacaagctgtcaggggaaatcatgacctaacacattgaaggaacaaaacacctttgacaggcagatctcattgtgcagtgtaagaattggcttctttggtgtaactggttgccaaagatagccttataacatgattttaaaaagcagaataaagagacattaaagtatatattaatcgcatgttttaaaggcccctcgagttaattgtttttgtaaatttctgggtttctacaaagtagaagtcattatcaagcagtcttcttgaagttgtttagcattgtggccaccagcacaggatcaggagtcacaggccagggttcaaacctacatcagtggcttactgattgtgtgacttaatgatgtatgatctcctctctaatctttggcttcctgaactataaaatgtgagagtaaaattacaggtcctgtctcactggatagttgcgaggattggagtatgtaacatacttaacggtgtctagtagttttattttttaaaatcaaaaattgcactgctgttgccccaaaaatccatctaaaaaacataaggcaggccctcctttaaatatatggaggccaggaaacatgtttcctgttgaataactgttattatttttgtatatgggagtagaaataaggaaactagaaatggcacagaatttaggagaaaggaagacacataacagaagctcttcctgtgcaaaaggagcaaaatactaagactctcctcaattagagctttttagtctggttggggaagaaaaactaacatataggacagttagagaattataaaaatattgagtagaaattcataagaggaaaaatatcactggaactagagcagatggtgggggctgagtctttataaatggaattggaactgaacttagaaggaagagaggaggaaagcagggcagtgctgtaggctaaggctggtaagtgagcaaaccctagaggcaggactgaaaataattttttaaaatcatctcctgaagggacgtgactgactaatgagtacagggacaccttgagtgagtacatagtgggtaacactgaagccaggcaaagagtttgagcctggttagggagactttcagtctcttaaaaaaaaaaaatccctgacatatactagaaagcagtggtttttataaatttttgattgatacatatgaattgtacatatttatggagggcatggtatattttgatacatgcatacagtgtgtaatgatcaaatcagggtaattaggatatctgttaccttgaactttttttttttttagagacagcgtcttgctctgttgcccgggctggagggcagtggcacgaccatagttcactgcagcctcgaactcctggcctcaagcaatcctcccacctcagccttccaagtaactgggactacagacacacaccaccatgccctgctgatttaaaaaaaatttttgtaaagatgggggtctctctatgctgccgaggcatgtctcaaactcctaccctcaagagatcctcctgcctcagcctcccagagtgctgggattacaggtgtgagcttgtaacattccttttctttgtgtcgggaatgcctcagatcttttcttctagctattttgaaatgtacaataaattgttgttccctatggtcaccctactgtggtactgaacactagaacttattccttctatctaagtgtatgtttgtacccattaaccaatctctctttacccctttccccttcccagccactgttagccatcattctactctacctcggtgagatccacttttttagctctcgcgtatgagtgagaacacgtggtatttgtctttccgtgcctggcttatttcacatagcatgatgaccttcacttccatccatgttgctgcaaatgacaggatttctttctgtggctgaatagtactccattgtgtgtatacataccacattttctttatccattcatccactgatggacacttaggttgattctgtatcttggctattgtgaatagtgcttcagtcaacatgacagtgcaggtatcctttgatatattaatttcctttcctttggataaatacccagtagtgggatgggtgggttgtatggtagttctatttttaggtttctgagaaacctccatactgttttccataatggctgttgtaacttacattctcaccaacagtgtataagagttcccttactctgcatgtttgccagcattgttattttttgtctttttgataagaacctttctgactcagatgagatgatacttcattgcggttttgatttggatttccctgatgattagtgatgttgagtattttttcatatatctgcagtatttaacagagctaagtctaaatgcaatatatagaatagattaaatgggagacactgttggattaattcagactgcagtggttgaggatttggatcccaaagaagagaacaatgccagtatctgcaccaattccatctttcctattacatcagaggggttgtccgcctcccagccaggccagtccccatgactgctttggctcccatcccttcttcattctcaagaactttgtgcacttgattaccccttctctcacatgctttttaatgtctcacccttgcctttgcttttaaaaatcttcaagcttttcctattaaaaacaaactaaattttctcattccacttcatatttcttccagctgcctcttcatctctattcatcccttaacaggcaaatcaaatttttcaaaaaatgttgtctattcttgtttgtatcgtttccacatctcccaactccacacttccactcactccagttgggctcttgacaccattaccctgccaaaacagctgtcactgaagttatcagtcagcttcaacttcacgttaccaaatgcaatcctcatcttgcttggcttctcgacatagttcaccgtgccctgtgtcttgaacacactgttttggtttttggttttctttccacatattgggctagtcatctgtctcttctatagtctcaccctcttccatccatcatgtaaggggtgaattcctcaaggcgggatccaagatcctctccttttctcactttataatctctccatcactcgtcttattggctcttgagtcaattattatctgcataaagatttgtgccaaattatattctccagtccagacctcttcactgagctataaattctgtttctgtctcctcttgaatgtttcagaagcacttgaaattcagcatatctaaaagggaactcatcatcttcaattctggtctatttcagtgtttcctctctcagtgaatagtatccagttgtataagttacaaatcttaaagtcattcttcatacctccctctccttcatcacacatatccaatccatcatgattggatagcaaaagaaaacagttgctcattttacttcgtaattactataatttgaatgtctgtcccctcaaacctcatgttgtaatttgagtcccaattttggaggtgaggcctaatgggaagtgattgggtcatggaggcagatccctcatgtattgtttcagtgccatcttcactgtaataagtgagttctcattctgttagttaccaaaagcactggttataaaacaaaacaaaagaaaacaaaaaaaaactggcacctccttctctctgtatcttgctccctgtctcgccatgtgatctctgcacacacctgcttcccttccctactgccatgcatggaagcagcctgaggccctatcagaaggagatgctggtaccatgcttcttatacagcctgcagaactgtgagccaaataaacctcttttctttataaattacgcagcttctggtatttctttatagcaatacaaatgggcgaagacactaattaacccttgaatctgtccactttccactttttttcttccaccaccaagattcttatccagactactgctgtctattctggaatctatcctcagtcactctggcctgtttccaggtctgttctcttactactcagccaggggattgttttcaaaatgcttctgtcccttccaaggtacattaaagctattaactcactttttactgctctcagatgaagtccagatgcattaccatggacaccaggcctggcttgatctagctactacctaatcttcagcctcaccttgccccaggcacgcctcactctgtactccagccatatctagtccttcttgcttggcataggccttccttctacaggcactttgcacaacacgttctctacctgggatactcttccctcctgtcttcacctaagtaacttctgttctttcagatctttgctcagtgatgtactcattctcaagaaagccttttcttttcttttcttttttttttttttcttgagacagagtcttgctctgttgtccaggctggagtgcagtggcacaatctctgctcactgcatgctccaccgcccaggttcacaccattctcctgcctcagcctcccaagtagctgggactacaggcacccaccaccacgcccagctaatttttgtatttttagaagagatggagtttcactgtgttagccaggatggtgtcgatctcctgacctcgtgatctgtctgccttggcctcccaaagtgctgggattacaggcgtgagccaccacgcccggccacaagaaagccttttctaacttcctaaattggatcaattctccttgaagtttcttacagcaccatgtttatatgattatttgtttatctgtctgccccactggacagaaagagccacaaaagcagggatgtatttgcttacctttgtatctctgtaacctggtacatagtaggtactcagtacatatttgttaaaccatcagttaggcatttgaaaggaatgtctagggcacagcaacaaggggatcacaaaaatgctttgtgtgctctagaaggtagaaagcagtatgacagatccatcctctagctgggtaggagagaaccgtgaggagtccagaggcctttctagttccatgctcctggggcctccaccgttgtctatcagagagctggcgagcgagccccactgcagcactgccattaccatacttccctggcctataccttcagactttgtcattcttgttacttcaacatcatgactgcagtttttagccctgttgaccactcctgccttgaaattctctcctactttgccttctgtagtattttatttttaagttttttcttatctctctgacaacatcttggcttctcttcccactcatttgctctatccgagtactcattccaaaattcagctttgatctcatggctcccatgtaagaggataaagtctgaacctctcagcagttcttaagagaccctctgaggaacttgccagtatctcaagtttcatctcctgcccttctgttatagcaaatgatttggcattctctaagcactccgtgtttttatgattttgtgccttttcctcatgccccaccttacatccccaccgcctatgtactggggagcctctactattttcaaaacgcagatcaggtcacttaggcctgctcaggcattcccttcctccaggctgtgactcccttagaggcaaggcctttttctataacatggcacttttatatagagtacctggcatatagtagacctgtaataaatattcggataacagaaaggacagttcttttatcttttaatgatgcatataaatagtaacctgaatgacaaataacactcatgataaaccagagtatcactgaataagcattccttcttgagaacagacctcttgatagttaaaaagtaaaatgtcaaaaagtttattacataaataaccttgatctactctgactgtatttttctgtctcacataattctgttacattgtcacaccctcctaaaatggatttctagtcgtgccatggtaataaaatgttgttctaggctttaaaatgatacatctgccctgaaagctttgaggtatttttttccctggggtggttattttttcagattgccaagagaaggttatcatataccaatcataatgtatgtgttgtaaagccacacattgcaatactttttttatgagctgttatgtaagccatgcttcagggcaaagcagggatgcagtggaggaagagccgttttatgcatttccagctgcacaaagtagtaacatttcatgtggcagtgctatattcattttcgagtttctcccctagagggataataggacattgcttttttgcctttcaaaagggtataacaaacattctctcccaacacaaatgccacatttgacctcattctgctctcagtcagtaaaatgtttttcttagtgtcataagaattattttctgttggtgactttaatttcctataaggtttttaggaaggtttggaaatcattatatggtttcactgggtttgccagatgtgaaggaggattaagaattaaactgtttgcttggctttggctggtattagattataaaatgcacttttattggaaacaagaatcaaaggataggcctaaataagtacttccctggattaaaaaaaaaaaaaaagtgttaacagtgtggtctccagggattgatattcggaatgctattttaaaatattttaaagagcatcgagaaaagagagagtcttagctcttctaggtactaaagtagggttgattggcacaagctgaaagttcactccaaaacattatgtgagtgggcagaagaggagcagatgtgacctcattttcaatcagttcagcttttaagccattcccctttctccacctgatgaaatgctgtggttattcttttgaagggtctgtttagcagggttaatttcttattatcctactaagccatttggtttttaaatgtatatttcctctctccatgtgcatacataatatatatgcatacataaattattcatatgtttaaaatttctcacagattttattttacaatctttctttcattactttgctttcattttttttctcttcactttcccaatacctttcttatttttagacagatcattttgtaggaataatgtggtaagatatttcttgtaaaatattgacttctattaaaatattttgtgtaatttatgatatctcatctttagaataaaaatgctacttaggagctttctttttaaaattcaggaattgcttagttcctaaacatgaagagttaaaatctactagagccttttattatttctaaaaagtataattatcagccttttagtagctatgagagatggactgttcagtggcattcatatgccttgtgtttataggcctgtcttgtcatacgtgctcttaccactgaaatgatggcataaactttgacaaatgcagttttatcaccttttgaaatatactacaaaacgatgtattaactgtttaatatttatgtgtgatttttttcaagttcagttcaaatcagctaaagagttaatgttaaatattcacaataaaaaatattttttaaaacctgtaatgcatatttatgattcagttgatgagccaaagcatgaatttttataaggtctctgaaagatagaacttacatagattttataaatattttcaaatttcatgtgttacatagacttcttaattagttgtctatgataactttgatctgctccaattaaacagtcttaagaataaaagtttttttgtaaaacaataatcaatttgttgtttatttttctgttgcaaaaattaacctgtattttggtcctttaattacttgcttgtttttaaaatttattcccacttgagtattaactcatgtttttctgacctgatttagcagggaactgtttgcaagataaattggccaagagaactaagactaacatcagcagatttcctttttcatgtttaaataaagtactcattttccttgaagtgccaacatgatttatccaaatctgaggaagagaagaaactaaaaaaaggattattcaaattttagatttgtagggaaataatgttttcacttatctcatttggattcccaaaatgctagcttaaaccaagccaagcagtggcataagataatagacccaaaatcagtttatattccagcaggataatagatgagccacagctggatgttctccatttactcatccatgaacaaacatgcactgagtacctgctgtctactaggtactcgggacacacagataaataatacacagtatctgtcctcaaagagccctcactttgactggggagaaacatacagatactaaggcaatacagaagtgcaatgttagaaatattcacacgtacgaaagccgaaagtgcatctgtgtaaacaaaacaaaacaaacaaacaaaacaggacccaggaccatgggaggagggcagagtttcccaggagctggttcctgagtttaaatgtgctggtttgaactattgtgtagttaatggtaagttcacatttacaaaatagaacattagacattacagtgttaacacaaagaagggttttgtatgaaatctccctttttccagtaataattttaacttatatgttgagaatcggaagtttttattttgtaatttaccatgatgcctttaaaatatgccgtgcattgttatggttctttaaaagtaaatttagcataactttagtaaatttgatcacctactttagtttggatgaactaaattttgttcaaaattgtactatatacttctgagtaaatataacggatttgttacccatatttactaatatcactgccaaaaccacttttaaactatacctaatcactggaataatctagagttccaaaagatcaaacttgtgacttagaagattttgtatttctgaagtttttcttcttaatatagcctcttatctctgaaacactttaaataaatgtatatcatctaaagaaagttatacttgtccattaagattgggttctggtaaaataaaggtaatatttcttgtcagttgaagagcaattttcctaaagcctgagtgaagaggtgcctccccaccagaaagtatattcactcacaatgtccaatgatctgagattaaatgtcaaatacttactaatgtatctacttgaaatagagatggcaatggaaagtggacactggctaatttttttttttttttttttttttttttttgagacagagcttcgcttttgtgcccaggctggagtgcaatggcacaatctcagctcactgcaacctctgcctcccgagttcaagaggttctcctgcctaggcctcccgagtagctgggattacaggcatgtgtcaccacgcctggctaatttttgtatttttagtagaggtggggtttctccatgttggttaggctggtctcgaactccagacctcaggtgatctgcccaccttggcctcccaaagtgctgagattataggcatgagccaccgtgcccagccgaaactaagactggggataccatcagtgcataattattgtccaaagacagaacatatgggactaatatgtcagtgttttttatatactaaattgaaataaatctggtgggaacaaacctgtttaacccttgtttggcttcttcaatgattttaaattcttagaatggttcaaagtttttcacattgagatccagctccccatctttcacctggaggaagaagctctgtggggggttagaaacagggggatggctgtgcatgctttgcttctgtttaaaaagggaattcagtctccagaagggaggggattgcactggatgcttggagcaggcatcagaacatgtagatggttttggataatcttcatatgaggttatcttcaataactcaaagagttgattgacaaaaaatagttgattagccaggcacagtagttcatcccctgtaatcctagcattttgggaggccgaggtagcaagattgcttgatcccagtagttcaagaccagcctgggcaacaaagtgagaccccatctctatttaaaaaaaaaaaaaaaagaaagaaagaaaagaaatagttgatatttttctaatgagcatgtagtatttttggtacatttaattttcctgttaagtcaggcaaatcacgaaattatactaatgatgtgggagaaattgcattaaaactgggggaaaagagcccaagacttaaaacttacctcatctagatattctgtagttgatcataattactgtacagaatgcagagatctttagaaaattattgtgttgatacagatggggacttcttttaagaattccaaatggtaatgcataaaaatcctaagattggttaacaagttgcaaaattgtgagatttattgagaggctcttatataatggaaatcttccttttattcagatgactaggtgatcaaaaatgtgatatagacaactttttaagaagatacctttgtttttgaaacagggtcatgctctggtccccaggctggagtgcagtggcacaatcatggatccctgcagcctaggaagatacttatttatttcagtattcttcattatagtacaggatagatctgtattatatactgtattatatattttgcttgtttggttaaaggggggtggcatttaattggctcaaaatgcccccttagaaacccgataaaatcttcccagtaggtggctaaaactgcttcacagacttgcccacttgtaactgcagttaccatagtatattagaagtcttgagataaaaataaaagatataactattagctattccataataggcatcactccattgtcaagagtcccagtgtttcaatctgtaaagtaactttgggacgaactggtttactgtgtagtactcagcctggttaccctgcttaagtttaatatacagtattagagttgctgaccttgatttcttttagtggagcattatgatgtcaactctactattttctctattttgttaccctttggtttatatcttggcctgatacttaaagaaagggaaaaaaaagataaagaagaatagcaattcctctaagcgggtctatttctttgagcagataattcttaccagaatatcatactttaagccacacctagagcttatatagaatttttatatttccatagttacctgaaagcatgcttcatccattttcagttctgccctagttgctaacagaggcattgccattggaaagtggccttcaatctctttctagtttagggatattaaaatatacttggaaatgggtcctttcctgtatggatgacattctagatatttaaggactggtaaggtctctgtttaatcttgggcttatccattttaagccctgattaagcacaaattccttgaccatgcccagcagggctgcagctcccaatgcagtcatcgctcagtgctctgaaaggagcaagacatggagctcttcagtcagccggaaatgtctagtccatccagctgtaactaagcagagagaaagaagggtactgaggctggtgcactccacattcccacccacatcctgccacatgttggtgagagtctggggagccccagcctactggcacgccttgttccctctgaatttctggagcttatttatttttaccacctccctctctgctttctgtgtccattccttctgctccttttaggtaactgcagccagagaaaggatgctgataggatttttctgaagaaaggtgtttttgatcaagagagttaaaatcacagaatgaagtttggcttgttatacctttaaattctgtggctcatgaagcatgataaccaagtagtgtgcatgttgttcaagcagtggccctttcctaaagctaagtcatcatttctcaagagatcatgtgactgcataagctcatcattaaaagcttagttttctaggcttcacctgtgatttcaaattcaaacaagcctatgttactgtcatttgctctaaagaccatttttctaaatccctttggatttatattatctctaccaaggcatggccatcttggaaaaatattacatataagcaggatttgggggtaagaaggggcactttgtaagttgtaaggtggatggttactagcctgaccttacttctggtaatccatattaccatccagtgataagtggttatatttttcagtccatttccacctttatgaacatactgatcttggaaaattatctactcatcctcttttccatttctgtttaacagtgattcattagtttgggctgtagagtggatcagctggtgtttacgaaggtatcattgtaccagtgagtcacagaggcatctactgattctcattcactctcagaaaggaggagtatgtagctttcctcctcaggggagtaaagtattacaccactttatagccgttgtttgaatcatataattaagatttgatgtgattattcttagttgacttggggttagacagacaattcttgtatttggttttgccttccgatttaatgacatgcagcctctgagaagtgagcaaattcaatttttctggtgctattatatggcattattaaaagtacagtgccgtgtagggaatatagagttatgttcttggtgaattcataaggtattgccagtacgggtctatctgatttaagccctgctctcccattttgtattttccattctttatctccccttttcttttcggagtctatcttaccaccaaagcagaaattttaggattcattcatttattcagtgagtatttattgaggaattatgtgccaggataagcactgggcatgcagtggtgcgtacgatggacatagcctctgcactttcacagaacttacagtctagtgcagggactagggaaccaaatccagcccaacacctgtctctgtaaatacatggttactggaacacagccatacccattcatttacatattgtctatggctgctcccacactgcagaggcagacttgaataattaccacagggaccctgtggtctgcaaagccaaacatgtttactacttaaccctttgaagaaaaagtttgctgacccctctctcatggatagtgctgaagacatttcataaatgcagtctagaactggaaaagccttgccaacccccttgaggagtgtgtattctccagagggcagtgggctactgctggaatatggtaagcagggaaagaaacatgttgatgtatgaattttagaaaagtccctgtggctgctgtgtaggaagtatgtgtcagggcgagaagcactaggtcatagtagttaagagtgtagatcctgagccagactatttggattgaaattttgactctactacatactgattctaatcttaggtaacttccctgtcagatgtcccatctataaaatagacatggcaatcatagtacctaactcatgggattgaataagttaatgtatgtgaagcacttaggacacagtgtttaccatcatcactattattcctattgtaatcttgttcagaggtgagggtgcctgaattaaggcagtagcagtgaggatgatagaaagaagtggccagatggaggctctacacaggtgatagaattgacaggaatttatgattaattggatgtcagaagggtagataaaagagaataaaaagttgagggtgattgcaggttttggatttcatcagttgagtgaatggtggtttcagtccctgaagtaaggagacagtcagtgaaacaggcttgtgatgtgaggtgaatgataggttcagtttttggtatgttaaatttaggtactagagagatatgaatagaaatgttcaggaagaagttgcctgtaaggttttgagttcagaaaggtgatacgggctggggaaatggatgtagcagtgatcactataaaactggtcactgagcttggaagagaatgaaataacctagaatgaggatggaatgacaaatagactaataacagaaccctgaagaacactaacagtttaagattagacaaagaaccattaagtcaaaaaaaaaaaaaaaacaacttttggaggaaaataaacatgaatttttaatccattaaaatttctgtcattgaaatagttgaatttgaaaaatatttaaatttgcaattttggtattagcataggtcaacctaaactatggcgtgtatttcacaatttgatttcatgtactatcatattctatattcttctaatattcaatttcttctctatggaacattaggtaacttagtggatgctatggctatggatgctgacatcatatgagctgttccaactactcttctatatttaataacatttccttacctccctgtttaccaattcacttgagcctgtgaaaggaaaaactgaagtggaggagaatgtctttctcctttttgtgttatacttgtttcagcatcaacaactgggaaccagtttgttacaacattttataatgatatctctatattaatttacttacaacactaacataagtaagtataattttggaaggagccaggagataaattggagaaacgaacactttttccatcatcagaatcaccccttacctctctcttacagtcatgcgtgccttacactttacttagttaattcccaagagaatcttcagttcttcctgaatatgatttccaaaaaaacagccttctactcacttactctgacccttagtatggctcacaggttaggctcaagctaagtctctgaggtgggacaatcagaaggctgatctagaggctttctcaaccctgtaccacacatgcctgaagaaaggcatcacatttatacaatcaggctgtgttgccttttctatttaggggggaacttgtgaaaaactttgaaatgctcccaaaagatgtctgtctaactcaactttccagcttatctcaccctttcctattttacaatcctggaaattacagaaaactgagagtgatgcaaaggactcttgcccattgaaatggaaatagttctggtggaatgcaattgattattgccctatgcagagtgaccaatttaaccagatttgcatctatttgtaaattctttgcaatattcttgatgtttatgtttgtcctttggatttatttttgaaccagttgtaatatcttacaggttccttttttaatgagttagttaaaatttatgtcccatcttcaaaaaaaattatcttgttatatatacacatgtatgtttatacatgcatatcacatctgtagaaaaattcacaagaagttggtagctgtaattacccctgcagaaggaaaggcaggaaagcttgcttttcactacatgcccttttggatgttttgaattttgtgttgtatgcctatgttacctaaacaaatagaaaatttttaaaaatttctttttgaactcttgaaaatcaagacttagcgatcccttgactactaatttcacgtctgaaataactgactttctataaaggtttttgcctctaaataaactactaatagagagcagcctacacatcaacatcatacttagagacttacttttgtattttttaaggcaaactagtaaactttacttttcaaggtagctctaaccctgtagaaagattttggtcgggtggtgctaattctatgactactctgttggggaatcacacagttttagtgtagagggaagtggcagacccatcagcctattttgcatttattctgtatgcaccttgcctcttcaccagctgtgtcctctataatccccttgtctaattataacgagcagccctcccattaagccagtgattctcaggcttagatgtatattaaatcaccaggagtgcttttaaaaatcgaaatgcttagaccaattgaatcacaatgtctgagggtaagacacagacattggcattttttaaagtgatcaaggtgatgccaatgttgagaaacagtgtcttgtgcgaagaatggtactggcttaggaaaaaacttaacaaataatacctcagaagcaaaagcactcaggatatctgactggaagatctgcataggtgatgaagacggcccaaacagaaaagagaggcaccctttactgtgaatgaatatccttgtacaaagaatctgttttgacccatgctgcttctggaatggggcaaactagatatgggggagtggtttaaaagcccgagctgacttagttacagatattagctttttttatacttctgatttcagataaactctcagtgagtaaaaaataccaaatcgggactctgcatatccccgccttgttcctctgccatttggggcactgagccagcctgctgacagtgacatccatctaataccactgccaccatatggttgtgctaccgacaaaaggttatatttatcacacacggtacaactgggaaaaccacatactgtacaaacatgacctattaagcatctgttttaatcaaagattctagaacttctttgctctaacccttaaaaatatgctttattaagaggtctttgatagagaagtagatttgtaaagggagaagtaaaaatgcatcctttcattaattttgaaatagtaaggcgaggagatagcctatttcttggtatttcttctctaccctgaaagatatctcctaatgggaagtcctgattaatggcccgcttgtattccaaactgttttattgttgcctcagcctttttcaaaacctgaaaattggtctcatgagctctactgtggtggtttgccttcatgtactcattgtatatcccctcccttttgtataggaagacagagatgtcaatgaccccatgcccaaccgaggcggcaatggactagctcctggggaggacagattcaaacctgtggtaccatggcctcatgttgaaggagtagaagtggacttagagtctattagaagaataaacaaggccaaaaatgaacaagagcaccatgctggaggagattcccagaaagatatcatgcagaggcagtatctcacatttaagcctcagacattcacctaccatgatcctgtgcttcgcccagggatcctcggtaactttgaacccaaagaacctgagcctcctggagtggttggtggccctggagagaaagccaagccattggttttgggaccagaattcaaacaagcaattcaagccagcattaaagagtttggatttaacatggtggcaagtgacatgatctcactggaccgcagcgtcaatgacttacgccaagaagagtaagcacacatcctcttctttctaaaaatggggcaactgttgttttcataggtttttaggtttagttagattgttagaatgaagaaataattattgatgcctttatttcaaggaaataagaggatctttgaacagcaaaatggtcagaaggaggcagtccctccatttatgccattgtattgaaggtgggctgtataaaattctggggccctctacgtcagtgctattcaaaatatggtccccagactggcactggtcaatgaattttttgttaccagtccacagtgagaaaatgagcttgcaccaggatgtaagtcaactacactattaaatattttgtttagtttaagtgacaactttttaatagcaaaacttccttgatttgttgattttcattctggagcaagtgccttatcttgttgtggaacaatagcaaacagtaacagtgttctgggtgtctcacatcattaactagatttatgtttcctttaatttttttcctcagtactgaaactggaaattgaaacactttactatatgcaaaagtaacactcagatagataaaactgtgacctaagatttccaattcttttcatgtagtatgatttttaaatgaaggattttcagctcttaacttttgatggatagtgattactgaatgaactcaaagcttttctctttcagtttattcaataactggttctactactataggatctacatagctttcattaatgtagttggaaatttaattcactgctactagaaaacactcaaaatgtattcctgatgatgtattgttagcataatcttcatttttaaaaggttaatacagcaggtgctcacactcccatacctgttcacatacacgtatgcatgtacacacacacactcacacctattcaccagcattctttatgaccgctaagtaaaatcctgtgtccaatataatgccatttaatagactttgagcattcctgtacatttactggtaaaagtgagaagagatgagtgaaatgtgcaaagaaggtaggagtggaagtgcagcagtgtgatggtgagtgatacaacctcttatacagagaacagtcagagcatctcccagggctgtgaaggaagaatcttagagtaatttattcccagtagagacttgcctagtcatagatagcattgccagatttagcaaataaaaatacaagatgcccaattaaatttgaatttcagataaatggttaaaaaatttagtatatgttccaaatattgcatgggacatacttaaaaatttttttaaattggatttccctgaaatccaattttaactcggtgttctgtgttttatctggcagtcttagtcaggagataaagatggttgttaaagagttacagctgccatgtgaggaccctttaggacccctaacaggatctcgagtccctcgtctagaacgtgtctcagttatcctcagtgcagcactcagtcagatccctcatctctgttacagaggtgctttgcgaaatgactggtggcatttcatcactgtaatgagggagaagggaagggactttctgctgcaggctgggacttagtataaagttattgaattctcacaaccaaactgtgagagagctcttacctgtgtgtgtgaagtctgaggctcagacagagttgtgacttctttgcatttacctagaagaatggcaaaactgtgagtcgcccctaggtgatttggtgtgaaagcccctttgtctccatcactgcacacctgaggtatatatctctctctctgagtagtgtacctcagtgcagatgttacaatcagagggtgagcttaacagtgtggaaacaagaaattttagcacataaactgtttatttaaaaatatgtcacttaaaacaccaatataaatatagctaacttttcaatataagaaataagaaaattaaatgatgtacaaggcttaaagcagggcacaggatttagagacatcctctgtgccttcctccccttcacccctcacatccagtccatcagcaaggccccttggttctgccaccaaaatgtagcccagatcacttctgaggtccgcttctttcctctcctctacctccacctgaggccatgcaaccatcatctctcctggaatcctgcagaagtctcgttactggtctttccatttctactcttgcctcttactgtcttttttttcagacagaaatcagtgtggtcttttagaaacccaaatctaaaaccattctgtgccttcccattgcacttaaaacccaaactcctaacgtgcagcagcccccacgctgtggcccttacccaccttgcagacctcttcttgctactatacttcttgcccacatagtccagctgtgctggcctgtctcaggtcttctgcatatgctcttccctcctccatgaatgcttgttcctttcttcccatgacgggctggctccttcccatcctttaggcctctcttgcacttctctaaccatgctgtctaatttgctaaggccccactttattctctattacttctctttagccattttcttcatggtatctatcaaattttataattagatattggtttattaagttgtttattggctgcctttctcattagataagttcctaagagcaagaactatgcctatttgtaagcctagtaactgacaagtaggaactcagtagtagtacccagttggtaaatatctgtcgagaatgaatgaacgtgtgaatgaaatcagccagggttcaaaccttgatgccatcactagatgtgagatctttgaccagttacttgtcctctctaaccctcagttacctaaacgttaagacagatctaaccataccaatctctcaggattagcattagaattaaaatgacataattgactacaaaaagtcttttattagcctgttggttagaaacctgagtattattagctgtttttactgctatggtattttcttccttaccttgttgtcaacattcgaatgttttcagttactatttagctttgataggctctgttgctttttggaaaacataaatgtcacacattgccttgtctacatcctcttgcttctactagtaccttccatgatgctaaagccttcatttcctttgaaaatttcagacacactgatttccatgggaacctcgcatctctgagtcctccttgcaccccgcagtttccttcctgtctcctttctttccttcttccatgccttgcatagccagttctgtcccgtgttctttcctctggcacaactggagcagtgcctagaaataggacattgcatgtttttgtgtattatttctgtaaatattgtgtctccagtaaaattaaaaggcccaaatctattttagtaaatgctcctaagcctctctttgaaatcctatactagtgataaaagtcattttttaatatttcaaaatgcccaaatataataaatcccagaaacttttttaaactgaatccaaattattttttaaactggattctttctcccacttaaaaaaaatgagataggcttcattcctttttgaacacttacaattcagtgtagagtataacatacttttctaagtaaaattatttatactttagaatgtggacaatctttggaatttttctctaaaataataaccaaccatgaataaaaatcgcctaagtgttgcatattacctaatatgcatattagcacttgtctgcttttactagcaacatattgaaaacatatcgcacatccatattgtgcacatgaggatgcacccttcctcatcctcatccctcatggggaatgtgcttggagcccctcagaagctggcttgctgtggctggctttttgccgcttcagaacacaggccctaacagccttgttctcctgcctctgtctgtcatagaaatgaggcacctgcatagcttagagaccaggcttgggctgtttgtccagctgtgacatctgacactgtggttagcttgttcgttcttgcggctgttgtgtagtctttgtagatgaatgttctcttccctagaagcaggagagaactgtccagctgctggcatgactcacacttctgtatgtgatagctttgaattacattcactgactgagtaatttattggctgttgattgcgtgttaaaagggtgagtaacagtattttgagtgaactggaggcctgcttcttttttaaagacttgagccaagaatgacttcacctgccttcacacttttttctataaaatacaaatatgattttcttcacagttcaacagatattgagtatctctaatatgtaatgcactgtccctgccttcaaggggctcaccatctaccactagggagaaaggaaagaatgccataatgtaaggcagaatgtaagaaccattagaaaggtattttaataatgtggttcagaggagtgagaggtcaagttacaggggagtcagaaaaggatactttgccaggcatggtggctcatgcctgtaatcccagcactttcagaggctgaggtgggctgatcgcatgagtccaggagttcgagaccagcctgggcaacatggtaaaaccccatctctaccaaaaatacaaaaaaatcagctgggcgtgttggcgcatccctctggtctcttctacttgggaggctgaggtgagaggatcccttgagcctaggaggcagaggttgcagtgagccgagatcacaccactgcactccagcctgagtgatagagtgagagcccatctcaaagaaaagtaaaagatagttttcttttctgagggggatactagggaagaccctgaaggatgagtagggtgccttcaggaagagggcacttgaacatgtagtagaagacatgagcatgtagtgcggtttacttggatctggaggtatgtggagggaaatacagctgggaagatagtagggcattggaagactacatgccattcacagagtctacattgaatctggtatttgggaagacccactgaaggtttataaagagaactttggggatttcaaactagtagaggtgttagagtagattagggggtggaggcctgttagagggttagtggcatttgagtgggaactccagtggaggttatagaaccagaaaaaggagattcagtgtaagagaacaaaagagttagaagcagtaggccttgggaggtgatggagtggaaggggaaatcaaagataaatccaaggctttgaagctcagtaacacaaagaggagtggtgccattaacagaaagaggctggttaggatagaacagtccactctgcccaaagctcgtttacctgaactggtctgctgcccggtttagatgaattcatgcagagccagtcaggataaggagcctgtttatgggaagaagtagaaaattctgtttgtggataggttagattttcttctgataaagtttgggattttatttccttttactgtgaactgctgatgcaaacacttggaaatattcttaccctttttttctgcccaacaaagcagacaatcggaggtattctgattcaaacaaatgaattaaatattttgacttattgaatgaattcatttgcttctaatatttaaccttttctcccacttacacaccttttgcatttctgttttgtagaaaagctatcttagttgcaattacaaagtgagatgatagatgtaaaagtgctttgaaaattctaagagctatgcacatgttagtaagatcgttaatatctttcttaagcttgtctatgggaaatattttttaaaaagatattttacatttacactcatgccttatatgccagataattctcctcttacctgagtccaaaataaatattaattcttatactgtaattttatctaaggtgaattgtgtttgtgaggttttcttattctctatccatattaaaggttctctttgatatctaccaagctatttagaatgtattgctataatttataaaatggttgctatttttaaaacattgatttaattggaatgctatagctttccttttagttttgttttatgtatcttgatccatagatttcagctagagctaaaaccttaaactactcataaaacattaagacaaatatttagaatatatagaaatcatacatacacatacatatatgaatcatgtatatgcagaggtatttgtactttgccctagtttctgtttttggaatatgtggtggttctatgtgaccatccaaactaattgatgacaatttttcacacacaatcccttttttacatagattgcccaaaacatattttatttttcagactacagtttggcaattttaggtctaatgttcagaaaacacatttgaaagtggtttcacatgacccaagatggacatgttgcttactgacctgaaaatttttactcttggaaactagactactttgtgaattcaggggttttccagatttactttaaaataagtccttgtgttctgatgtctacttttcttcttcacacacatataaacacaaaaacatatacacattgcatgttagaattttctcaagttgatttttgtttaaggttctggctaacaacagatgcatttagacaaactgaaattattttaaaaaacaggagttaacttacgttacccccatttctacagcagtttagggaggtaccatatttatttcagtgaggctacaaaaactggaaatcaaggtaacttgtttctctaaacttccattagcagagtagcagcaatcttgaatccctctctccctgaagtgccttcttacccttgataggttctagatggctcccttcccttggtggaaacgtccttctgctgcccagacctcatttggttgatgagagccttcccactctctggttattgtccaagttgctctattgacagaggatttatcttcatttcccctctcttcatccctctagctctgccaccaatgttacaattcacaaagtatgcctgataaaaagttataaactcacgttgcatttattgtattttcacagacctctacccccaactacgaatttagaaaaagtttcctggagactagtttgaaaaatatttacggtggcaccactagatatcccataacaacccaccccagtgacagacaatttcaggaaaaccttgactctttttttctctccgaataagtcttttgcccatgggaaacaccaacacagagattaagggatgttttttgtaccctttcctcctagagcatctcagtgtttgagctaacagtcttttcaaagtatttagtcattgttctctgccaaaaggtgatcagttccttccgaaagacagcctgtgccaatagacccagacatgctagagtgcagtgtgcatggcggaacacacgcccctttccctcagtgggtcagcatggtcacctttggtaatttagctcagactattccagaaccattagatacaggctgtctactacaatatatgtttctttgatgcatattggctcctgtgtgtttggtaaatagggaaattatatcaattcagtgtgtaagtttttgtggttcatagatttcctcttgcatattaatgtttggaagtgatcaggaataaggtttctcacagctaaagagacagccataaaaaattatttatgaagaccttaaggggaaaaaattctcttctgcagaagtgtttttatttagtgaaagaaatggggagtttaccggctttaagactcactcactgtagttgccgctatatttagctgtctgaagaagctgcacgtgcatccaaagaaactgagaaggaaactgattgatgaagaaggccatccttggatcatacttttaattttggtgaaattgctctgttattagaaatgaatgtctccaaagacctacaaaaaggaaaacacaagcctatgggttttaagtttgcaaaggatggactgtcatacgaaatgcaaaaattagttgcaattttaactgtgctgattggttttggtttctttagggctctggtcccaaagttcctaaagtttgtgtggtctggtcattgtccctattttttttttaagtcctattgccctccctctctccctccctccctcccttccttccttcccgtattttttttctgaagtctttctttctttctttgttactttctttgtttctttctttcgcatacccttgcaaaacagagattgctaggactacatatacgaggcagaaatgcctataattgcacctaaaaggtaggcatagccagactgctgggcttagggctatgctatgactgctttgcataatatagccataatataaaaggaagaatgggagatattttctatattttagattaataatttacatgacactgtctagctggtaaaccaagcataaaccaacacttatatagaaggaatatcccctacctctccatttattgtagaagcagagcatctattctgaaaaatagacgactctcaatagacagcaaggattacatatggccacaatggggagaaacttggcccagtttagagccaggactcaattttgccatagtcggctataaaactccagatgacttcactctttacatttacacatgtagatctttacctctggaatatctggtaaaaggacctgcgttggagagaaggcaatctttaaaagtagttgaaccaggctagaggcagttaggggaggcttccttcctctcattctgagtttaaaattgacttcaactccttgatctataggaatcatttgtgacagtttccccatggttaaggcaagtcattggagagagctgtaaagcaagatcataagcaccaatttttttttcttcagaaaggattgtagaagtagtaatatgaataatggttgaataattgttatataacttcttgaatgcacttataaataagttaattatctttgctcattttaagctgaatatgtaaaaggtacacttggtatatcataaatagatttagtctttcatcatttttgcaagatacaagttgaaagtgctaagaaggaaaaagggcttagcaccaaagccaagctaattacatgagttaaaattatataaataatatagtttaattacattcagtaaacttttagtctgtccctgggaaatgacctgtagctttgcttccctcttcactgaatcctaggggagattccactcttcaaaatgtagctattgtataggaggtaaatcacatttttaatagcctggtgacttattttagaatgaaccctgccattttaatcaaatggaaaatattcgtgcattctccagagtagaaaggcccagtgagcgaactaaaaccatgataagggctctagagaaagatttgagaatctaaactccacattcttaagaccctggagattcacaagtgtcactttaaaggaaagtgttgtagtcttcagtagaaggatgtacttcaacttttgtgaggcaggagctccctccagagtccacacgtggtaagctgcaggcctgctggagtgggtccccatccaaggaagatatttaaggctgatttcttctcccagtgagattgagttggggaaggggtattaaaggaggacagagaaactctcttgaaagcttctattgaagtctgtgtaaacacaactacttaagaaagcagccttgggtattcttatttaaatcaaatacaaagaagaatctatctatcttctgggcagacaataatgtaacctagactagagtttggttggttcttgacctcatatcttctgtcattgtggtactagtctctggctccagggtcatatgccagatgttgaggctgatgagtggaagggctggaattaacagtgtgctaagggtgtgcaccagtagacatagagtggcccagaaagggttcagccctagtgtacttatttacacttgtttatatggttttcaggaatacttctcgatcacttcaaatgaggtctaagctgtgtcttccacttccacataattaactctgttgctgtgactgctgcttttcttatctctctgttgcagcagctgatggagatgggggggcctcagtcagtgacagtaaggatcagcagcatcactgtccctgtgttacacctatatgcctagcagtatgctgggtttttaaatgtactatctcctgtgcttataaccatactgagatagtatattttcaatttcactatatttttggatgatgaaagtgaggctcagagaactagaaaacttgcaggtcacgtaactcgaagatggagatcctgggactcaaattctggcatatacacccattgccttgttagggatgctaacagccaagaggttgtgttccagtttgctacaggacattaacttctttttacagggaaagttagaaaaaggtaaaaggcaaaggtttagtgtgtcattattgcagaattttttcttgcctcctaagacagggtttcacaatctcggcacttgacatttgggccagataattctttgttgacagttctttgtcctgtacattgtaggatgtttagcagcatctgtggcatctacccactagatgtcaggaacacacacatccgcttccacctccctagttgtgacaaccagttctccagatgttgccacatgccccctggggggcaaaatcacccctgattaaaaatcactgctgtaaggggttaattgaggtaatgttatgggaggagggtgtgacacaatgaaaataacagagatggatttataggattaaggggaagaattggaacagattgatgaaatgggacaaatagataggaagactttgtcctaagatgaagatagttgttagattagtggagggggttacatgcaggttcacaggctccatcatggcagatctgaatattgttggtggtagtacagtaatcattcatggatgcatttataactctttctctcttctccctcctcccgctttttttttttttaataacaaataccgggagtggagaaaaaagatccaatcctgctatttctctagttctaccttttggccagttggtggccactgagggcgtttcagaatttggtgtatatttgtccaaactttattctgagttatattaaactcattctcctcttgaattatcctccttatttcttatttccattacttggttttgttttttgttttgtttttgagagagagcgtctccctctgtcgcccaggctggaatgcagtggcacgatctcagctcactgcaacctctgcctcctgggttcaagtgattttaccacctcatcctctccagtagctgggatcccaggtgcccgccaccacgcccagctagtttttgtatttttagcagagacggggttttgccttgttggccaggctggtctcgaactcttgacctcaggtgatccacccacctcagcctcccaaagtactgggattacaggcgtgagccaccatgcccggcccatttcttgtatttttaattagaagaattgctaatacctgtggggggaaattatttgaagtaacaagaaaaatatcaatcatgcttattttattaaccttcaaagacaattttacagtatacttatcaggactattataagaaattcacttataaatattgtagttacataccatcgaatgccagaatgaattatacaaaggtaaagtacgtaacaatactatgagtccttgctcagtgtcttcaataggttcaggaagaagatgtacaatgaagctaattttaccataggcaaattgatattgttgactgaaggaaaaaaatttaagcttttaaataattaaagttagttctatttggaagtcttactgaggactatagactgaggcttataacccagaagcaattctgtcaggctgttttaaggcagtattttagtttatggtttacatgtaggtggtgaagatttaatatgtgtaaaattatatctaagtttcagtgtaagagtatatttggtgataggttatagaagtataatcattaattttgtcaaatgttattttatgtataggaaaagacaaggactaggatcattgatcttttaagaaatgtagtgactgaggcaagagttgtggtggggccatgtgttttattttgttttgtctttaaagtattttttacagagctgtatgtcatcactgaatcaagagctttgtgaaattatgttggcaagtagaaatgagcatgcctttttatgtttgttattgtgccttacaacataaacaagagtcaagttcctatggcatgtttctggtcacaaaaatatcaccaaacttctaagtaaggaccaaaatacttctaatattaaatattgaaataaatgtgaagtatgcatacatttaataaatattaataaaaacaagtaagatgatgatttactcaatttttggtgaacccatgagtgatggtactcatagtggtggtgaatttaatcaacgagtaaacgtttacgaagcgaaaattgtcaggagtaccttccaccaccatgcagttcaaaaacaagcaataacaaatgtggggagcttgctgagcgcttctgtcccacatcatttattgtcctgcatctgtataattgtcgtctacattacacatttttatttcacagtaatttgtatttattcatataatttgcaatccactcattccagtttagggtggtgtgcagccagaacaaattctggctgctgaaaacacaagatgggcaccctccctggccaggacgccatcctatcacaggtgtactcagacacacccatactcattcaccctaggctatgtagacacagcatttcacctaatgggcacagcttggggatgtatatccagagaaaacccatgcagacaagggaagggtgtgcaaactctacccagacagtggcatcagtttttttttgtttttttttttctcatcagcattaaaacaaaacaaggttgaatgaggcaatgttattcaaggacctgcactacacttatttaataacttggcttgtcagagcttacagagcaccctttaacgtgcttaaaaaatagatagctacagctgggcatggcagctcacgcctgtaatcccagcactttgggaggccaaggcgggtggatcacctgaggccaggagttcgagaccagcctggccaacatggtgaaacctcatctctactaaaaataaaaaaaaattagccaggtgtggtggcacgcacctgtaatcccagcttctcaggaggctgaggcagcagaattgcttgaacccggaaggtggaggctgcagtgaactgagactgtgccactgtacttcagcctgggggacagagccagactcagtctcaaaaaaaatttaaaaaataaaaaataatagatagctgcaaataattaggcttttatttatgtcagttaactatcaaaatatacaacattgaaattaaaataaaattttaatcgttaattcatttaagaataataatttcattacatattacatattttatgaaaataatttttttaaaattaaaagaaacgagtatcattgtcttagatttttaccaacttctgtaatgtctggcttatagaagataactgaattccaacacctacctctgcattcagtctatgcccctgggttgttttagttgaaatatatgaagaaaatctggcctcactcagatatgtaattgcaaaaggggggagcattttaatagcttttttcaagtaattgtggatactcctttttgatactgtactaaaaactagtggtagttttttaaaaaagtagctgcaatatagaatctgaaagcataaaaaagaacctttagtactgtttctagtctgtcttgcactttaacaggacattttaccattgtatgatgctgtaatatcaggagttggtcatttggaaaatattggtttcccaagtaatgcagatcttttaaatattgacaatttcattatataatgataagaacaatacatttgttaacatcatcatcagtctcattggaaaggccttaactcctgagaaactgtcatatttccaaatttcttagtttcgcctgagagctcaagttttgtcattggcaacaagtgatgtcagttgtttttgttgaagtgacaggctcccttcattcatgttcaaaaaacttccagataaccaatctcagtgaccatagtttgtcctttgtttctttcaagtgaaaatggcattctattaaaaaataaatcataaaaacttattcagcatacagatcagtctcagacgcttttccttgacacacccatcatagttgaatatctaatagaagtctttcatgcatacttcccatttcgtctcacagaatattaaaaaggcatacactcaagggatttaataaaattaataaatcttcatcaaggaagacttactgcttcatcaaggtcattcagtgtaagtggtatgtgttttatatttagggtatatttatgaaggtatattaagtatattagggtatattattatgaagaataacttaaatatgggtaccatttggtgtcattgccttgatttatgctaaggcaccagcagttttacccactttgctttggtaccatcagagtaaatatccacacagtgaaaaagatagtatcttcatatgatcagcaaaataattttgacctcaccaaacttcagaaagggccttggggaccccacaaatctgtggatcatactttgaaaaagccgctgctatagattttagaatgaagaaggtgaataataagtttcctcagaaaaagtttgtcatcagcagtcttccagtttgattattgacaaatacagcattattttataaagtaaaatttaatctcttatacttgatttactggtaatttcagagattctgtgcttagtgatgatttagataattaagatgctcacttactcaaaattgtattgagctctattttaattaactgatacagaagaaaaacttgattttatattgcagaagtgcagtcaacatctgcacaaacatagatggccggatagtatgaaatcctatctctacactaattacttaggattgatggataaaataatagcaaatcggccagctttaatattcctgggactaaaatggttttaaatggtatagggcaaccagcctccaaactggaaggagtaatttattttaccatcatcctattaattaaaattaaaggaactcatgggaacaaaacccaagggttcaaggttcatcaatttattagttgggtattttattataatatcagtattttgtaatgattgcttttggaatgccaagaattcattgaacagggttcccaaaagttgtccatattttttaaagtctagagatagtgctaagataaatataaacacatcataaaataagatcaatggtatttacatgatgaatacctgtggtcagacattagtctgattacctaggttctaaactgctagctcattggtttggaacatctgcaaagctattccacgcaaagccttccccctttagcaagttacttttatcaataagtagtgatatacatagacaaaataattgttttaaagttagtcttaggaccaaattttcagtaggaaaataatataccaacctgagggcatatttcgatttttccaccccctccacccttcccttttcaaaagaaaaatatctgctatatgatacctgagtaagcagtaacttactgtttgtattctaatgattgtaaaacgttaagcagatatataatggaatcagaagaattcacccaaagccagagtaactaagatatgagtggttatgataccaggcaaaatgttataagacaaagccaaccttgcaagatgataaattgtcttatttttcccatcagtgtccattataaggtataatgtgtgagtctacacactgtggtgttgattcttgtatctctgtcccaatacggtgtgagttctctgagcacacagtagggttagatgggtattgctcttccgtattatcctctgagtctcaattttcttatctgaaaaagagggagtcgtcaatttttctaacttgttttaaccacaagaagccccagaatcctttttcaagtgacttcctaggcaactctatgcttttgttcttggcaccttctttaaatccgtgggctcctccaacaagtttggaaacctgagacctagatgttttcccaggtctctctcattttaaaattaagtttttctgtgtttctacattctcccctgggtgttccacaattgtttctctagataaaaaagctgaatagaaccagccagcaagcagctggtgtgcagctgttatcactcgagcctgaactttgtggcatgctttcttttgtggtattgcctcttcctgcatcctggaggggggagtggcttcacagcccttgggccactgccaggtgcgacagctctttttggaaaataatgatagatgtggcatctatttacttggctacctagtattggtgcagaagcaaatgctgctttgatcccagcactttagcaacttgcactgtttggcaaaacttgcgcttcatgtacaagccactcaacactgtgcccatcctggcaaggagagcatcagacgcagccaggataccaggcttgcccttcttcggtttccccaggagcaggcaggggaccagatggattagctggaggacagtcagccattttatattgccaagctcaaccatgctagcatttccaggatataatcctgttatgagaatgtcttcctctattagcctttgtttgtgccagctccaggggtggaggaaacccattttgcctgacatactaagaagtgacctttccagagccagctactgtttggtgaatagttgtcatggtctttccccatatctctgtatatacattcatgacttttagaacatagaaaacttattttttgttctaaaagcttatcatcccgtatatttccttatcctttacccttaccagccttctctacatgacctcaggtttgtgacatgtttagctcaccacctagcacatggtaagcagcaagtacatgctagctgttttactagcagtgatggtggcgtaagcatctctctctctctctctctctctctctctctctgtctctgtctctccacccccaagaccccctcattccccccaatctccctccctcccccaccccccaccctgtctctctcccttcttccttctctgaagcaatatgggattgtcttgaatttcttccacatgtcttttcagagtttttacctttttcatttcttttttctgagtctagcgctttgctttcatctcagtcttcaaatggcccagataaactgcttatcagaatggatgggagcccagtgcataagattgcactttgggagtcacatggtagcttttaaagggaatggcttggacgcttcaagaaccttgctcataatatattaaatgtgtcatagaattttagaactggccaggctcaatggctcatgcctgtaatcccagcaccttggaaggatgaagcaaatggatcacttgaggccaggatttcgagaccagcctggccaacatggcgaaaccctgtctctactacaaatacaaaaaaattagctgggcctagtggcgtgcggccatgatcccagctacttaggaggctgaggcacaagaattgtttgaacccgagaggcggacgttgcagtgagctgagatagcaccactgtactccagcctgggcaacaaagcaagactctgtctcaaaaaggaaaaagaaaaagaaaagaaaagaattttagaactgaagggggccagaggggttccttggtactgtgagagatccctcactttgtggataaggaatcccaagtataaacagtatgtgatcatccaggattaaattaagtggctgagaagaatgaatccaggtcttctaggaccgacctttcactataccagacaaaagagcacgaaagtgtgttgatcagagcagtagttttaattgtagtatttttgatacatttgtgaaacattttatagtaataaaaatttttacttaggagcaaaagaagtatgttatcaatcccaaggtaactctttttaaatgtggacatataaaattccaattatatgtagaagggcctctgcttaaatctaagttgtaagaagttatactattaataagagaacagatataaaaataataaaatcctgccattttcggcaacatggatgagcatgggggacattatgttaaaaataagccaggcaccgaaagacaagtattgcatgttctcactcacgtggaagctaaaaaatttgatctcatggaggtagagagtataatgacggctacctgaggctgggaagggtgtgtgtgtgtgtgtgtgtgtgtgtgtgtgtgtgtgtgtgtgtgtgtgtgtgtgtgtggagggctgggatgtgggataaagaggggttggctaatggctataaacatacagttagctggaaggaataagttctaatggtcaataggacagcaggtgaccatagttaacaacaatgtattgtgtatttcaaaagggctagaaaagaatatttgggatgttcccaacacaaagaaatgataaatgtttgaggtggtgcatatcctaaataccctgctttgatcattacccattatatgcatgtatccatatatcacatgtatcccataaataggtactattatcatatattaatttttaaaagccaccttagtatggcctagaagtagaggatcagtgttgagggtatgggcaaaatttaccattgtaccatgcctgtcacttagatcaccctccagcctggcccctgaaacgcgtacctgaatgctagggagatacactgaaagagcattccattaaaatgcctgtcaaactgaaggatggcaaatttctgtacttgagggtttgtggacacccataggcagattaccagccagtggcttctgcagcgccaggaaaccatgcctgggcacagaccagcaaatgtcatcagcaatggccattccttagaataggcacagcagggggaccagcttcacaggaccaggggcccctttgcagcagagtcttcacctcagcaagcagagctcacagaaaatgaggggtgctgcatggtatccgagagtgccaagttcataaatacacatgaggttcactttgggaatcccatacagagctgaaagagtgatgagcatgatattgagcatttagggagctttggtttcctcttctagcaattgtggataataatacttggcttgtaaagttattgtgggtaacaaatgtgctaaaggacataaaaggcatatcacacatgagctccaccggttggaggtcacagttgttggaggccaccttcatcccttgtgtggcatagagaagcttcagaagctcttttttctgtataggcctctcatcatgccaggtgtgtggtattcagccttatctttaaaatatggtaccctcttcattgtatttcatcctgccgtcttactacaaaagaggaggagtcctaaaggaagttagtaaatacaaagaagttcttaaggtcaacctaagataaagaaatgcttgcttgtaagtgctgggtgattgaatctataatttgcgtcaagagaagtgaagaaaaatgttagggtggtgcaaaagtgatcgtggtttttgcaattttttaatgacaaaaaccacaattacttttgcaccaacctaaccttgttttaggcatgtatctatttaaagacactttattttacctataacgttgatgggtttacattgaactcagggccaatagcactgtaactcgcacccaaacaaagcttgtctcacgtggattttctgcacaggacacagcacagcatctttgtgcttaggataccaggtagcacactgacattattctcgggaggctgttttaaacagcaaaattaccaactaaaagcacaaaaatgagaaaatctgtggcaccaaacaaactgcaaataggacacttgttttctctctcgtttttttttttttttttttttttttttgagatggagtctcgctctgtagcccaggcgtggcgccatcttggctcacagcaagctctgcctcccaggttcacgccattctcctgcctcagcctcccgagtagctgggactacaggcgtccaccaccacgcccagctaatttttttttttttttgtatttttagtagagatggggtttcaccgtgttagccaggatggtctcaatctcctgacctcttgatccgcccttcttggcctcccaaagtgctgggattacaggcgtgagccaccgcacccggacacttgtttactctatgagcagaaacaagaaacagaacatcctcgtgtgcatgcccatcaggcatctccaattgcaatccacatttgtggacgtagaatccacaaataataaggagccactgaatttttgtatatttagtatggggctcaggttaatcacagaaatatttactatatagttagtgggcaaaatgcccagtaccccattataataaacccaaatctcagtaacagtgaagatgtttctcagaggggcatggctcctctgatgtttgtcagataagcatgtcttattataggggcactcagacaacagaggcacagaacaaaacaaaatattttttgtctgttaatttatttcaaaaatgaaatctgataatggcttttagaaatgtgaagaccaaaaagcatcaaattttgtttttccatttaaggaatagaaataaagtggccgagttattattatatgttccgcccataattcatctttccttgctccttcccacccctccccactttatcttccacctccttttatagatacctaactgctaaaatgggcttgggaaggcagctggaatcatgccaaggtgtacccaacagaagctgctgcagttagtgacatgagctatggaacacaggaggtcttttgcactgattggaatatttattagatttagtgctgaaatagtctctgctgataagcagacctaatctgaatttcaaaggtccttatgaccacgtaaatgtgatagtatcatatcctcaggccccaagtgcatcacctttcctaaatggttggatgctgtattgaatctatttaatatcctggtaactagctttgacttttttcaggaatacttaataattttagatttaatcttccctcctcctcctcctcctcaacagaagtaatttaaattctttccaagtagtcattgcacctgtttcttacttcaatcttggtctcaaagaaatatacaacaaactccgatagaccacggccataaagtccaattttataatcatgcaggaaaaggaatgcttcttgaggatcaaaagttgcagtcatgatgctaggatgtttcatatccagtaaaactagagacaccccacctcatcagctgattgtgggagaagtcgtttacaaaagtcctgtgaagaaagaactagatgatataaatgtatgcatatttctagaacctgaaaaatataaaaagataatcaagtgtacttggacccatagccactggttttaaccattctgcagaagtatagcgcaattattattggcaatatgtgaagatatggatgatttcatggggaaatctttgaaattaaagtgggataatttggaggtacaggggaaatgtttttccctttaaactgtggcaataacccttgtaattgcatgtgctctccagaataaagatatagcagattgacatcagcttcagaaaatgagacattaggtacctgagggattcagtcaaattgctcctatgaaatcttgagttttgaagattgaaaaaaaaatgcttgtttttgtgacaagtgttttggggaatattttaggggataattgatgttctgcattccaataccttaggtaatgaggaagctgtggaaacagcctcctttcttttatgaaggctttcgtattcaagatcaccatagaggtcagtgctgtgaagctaatcttggacgcctatctcaattgcttcagagtatttaggatttctaaggtttttgatggatttttttcatcaaaagatataatttttcctccacatgaaatgctttaaagtggtgataattaaacatatttactcagtaatatttggaacattatactggaattcagaagctctggctttcctctttggatttataaaccaccaaaagttggcaactggcccttgtaaaagatttcttccagcagagctcttgtatctttgtttgtgttttcctttcccgcttaagcacatttatctttgcttttagctgctgcagccctctgagaaacagcagtcttcttggcagctgcattctgtgcaggctcctgctctatcagtatgacagctatctagaaggactatatattagatggaataaccagctgatatcagaagggaaaaaactggcagcaacgaagcacaaagttcccctcagtataatttgcaaatctttcaattaacctattgaatcaaaatgagaatgggtataaatagtaatgatttttaaaatatgcccttgctttttagaatagatgcattttcagcaaagccatctgcaaagtgaatacgaaaatttggtctaattctgttagtaagttgacattgttgttctggggaaagctttaatgtattattttttatgagaataaaggtatcaggctagattttttgcccaggggtttgctgattatgaagctgccagagtaatgttccattcacttgtagttgtcttaagtagcaactttaaatattttgaaaaaaggaaagaagtatttatgtttagtagaatatttaaaggaagaaagtaaaaacaatcacctgtaatcctaccagccaagtaatacatatatttatgttaaactgtttgtttgtttgtttatttatttatttatttattgagacagagtcttgctctgttgcccaggctggagtgcagtggtgggatctcagctcactgaaacttcctctgcctcctgggttcaagtgattctcctgcctcagactcccgagtaggtgggatttcaggtgtgcaccatcaggcgtggctaatttttgtatttttcgtatagatggggtttcaccacattggccaggctagtctcgaactcctaacctcaggtgatccacccacctcaacctcccaaaatgctaggattatagatgtgagccactgtgcctggccccaagtagtatattttaaaaatatgaggtcattttaaaagatgaggttagatgttatatattatttctaaaattttattaaaattgtttttacacatttttatgtatctttaaatattttttgtgcaacaccattttgctagctatatgatctgctgcatggatgaccacaatttatttcatccatcctttattttgggacatttggattattttcaggttttcactattgtaaacaatgctgtgaggaacccgcttatggctcagtctttgtgcccatcattgattatttcaagaggacaaattcctagtggaatcactaaatcaaaggattaataactggttccttttacttggtagtgttttgtcaactctggagtctctcctctgctctccatccctgtccctcactgcttccacttcatacagaatatatttgttttgcccttttccatttttctctttttttgtctcctttggtaatggtctccccctgtatatggactatctgtagaccattagaaattgagggactctcaagagagaatgcaacaaactgatactatttcaagatgacagttgaccatagcttacatgcagtgttcacatgagttaagtcattgggttccctgccagattttaagtgaactaaaatgttttctaaaattttggtttgagattttctggcatctgcctctttcagagtgagaattaacataccatctcagttgttataattccatcccatctttgagccataaactatttgataactaacttcaactcactcttcgtgactcactcgcctcagaaagatttgattttctggaaaattacaatgaagcagagatgtaaaaagataagtaaagataactcaattgattccggaaatgaggtagactaccgcaataattttttgaaatagtattaccaaattttctcctttacaacgtttttaaacatctcatatgtatcaattatatgctaatgaactacttgtttcctaatatctttaacaagataaattactaagtgtagccaacatatattcttactaaccccagaaaatgtctgttctgtgagttaataaatgttaactgttgtatattacatactcttttccatatttgttttacagtggagagggtcttcaaaaaacgatctagtacatctcttcattttgctatagggccattactatcaatgtttaagacttctgtaagtaaatattacaacctgtcttgcaaccaatcctgtaatatctaacaattctcttttgagaaattatttactaactccagcctaaagttatcatgctgctactgtaagactgtacctcttcagtcattaacagtgttgaaatttgcttttggaaatgtaagtcctccatatggttgatgtcatttcctcattgtaattagagtacatcgagaaggcatataatcactcactgagtgatgaaacatggattgggagagatgactcaataaacattttaaggaatgtttgtaaagtgtgattttcaaatctgtgttgaacttaaattcccaacttgttctctgcacaactgttttttactgacttgcaccttggtacaatgccattggtctccattgaagtctttatggaaaacagcacagtgaaactctttactgtgtttaccataaggaggcccctgttgttgttgtttaaaaacaacaacaaaaaatcccatccgatcttcacgccatgaatattgtacttcttctgaacaactggtttgttaaacacagacctcaccaggttttcttgctagaaaattcaagccaatattgtgatttacccataagaagtatttggtatacccaacccaccatgctactcacttggggtggtgcgttcatagtgtgctcattgtcagtcgtaccccagaactgtgcacacaggagcccttgaccctctggtatatacttctaaaacctcattcttgattcctccttctttttcctctcattctttctttatccatctttttccctccttctatttttaacttttgtaatactgttttattctgtgtgtctttgtaagctgctcaaagtccttgtggaataaggtgtagcataagttaataactaagtcaaaaatgcagacctttatttgctcagactgttaagttatctatacatccatgcatggtgcccaatgttgatccttactcctgttgtttcagctcaaatatattggtgtttgataagctggtacttctgtaacacagaatatggcatgtaagctcatatttgaaatgagagtccaatatagctataaacatatggcttacactgtgaaatgttctttttttcctttcccagggagttttgaagaaatatacaagaacatatgtccagtcctaggaatccctgccagattttttttctctaaattgtggtttgagatttcaaatcattaactggatacatctgtctgagtatgttttccttttcaaaaaaagaaaatttgaaaatagctacccaaaagacatagttcagtattcttaattttccataacatagttagtatcctcaacctttaaaattaaactgacattctctgagctgtgtgcagtcattttgttggtggccatgtatttcctgggtattgggtgaaaataaggaatttattttcctgtatgttgtttaagcatatatttgtgtgtaattcttagtaaacttgtaggtttaaggaaagagccttcaaattagagtcaaaggattcatttttaaatcttgctgctgtcactaactgtgtgactttaagcaaatcatataacctaacagagcctcagtttctttatatataaaatgaataataataataatgcctgccctttctatttcacagggttactgtgaaactcacatgagataacatgtattaaagtgctttgaaactaatagcagagctattagaactgcattgcctcagtctgggataaaaggagatcacaataactaatagcaaaatcaccatttatttggcttaaatactatctactctgctagaattttaactccctcaaattcacaactagttctgggagtcagccggggatgttgaacatatgcttgggaatggatcctgttggattcctcatggatgctcatgtgccttctctgtggctcactgctgtcgtctcctctgctgctcttgcagccagtgcttagtgactccacggtcataggacctgacgcctctaatgtcctcaccaaaaggaaatacagtcatccccatgcagccactcttaacaactgtcagctgtgaagttctcacctacatcttctctcatggtatctcaacatggggagcataactttctcatttttgggggctcattaggacactaagtgaggaggagcatcaggggatggctgagactgaggtgttctctaaaactgtattcgaacgtttctgtcccagagtttatacacattatttaaggttatagtagagactgcaagctgaatggtccaatgacgatgtgacctttaagaagcctctggcttccttcgtgaattctaaccgtaccgttactgtgtttgaggatcactggcagccgagctctgagtggggaactgagataagaaaggtgttgtcatgataacacctggacagctgcatcccacagactatgggagtgccaggaaactggctacctcacagcagagtagagaaaatggaaataaacacaaatataagcttttcagtgagctgtgggtcagagaaggccacaagtggtctggcagatcatggtgcagctctttgtttcatgagctacgtgcagcagtagtttttatgagctctttttgtagctttccagccctaggattcagccatggtaaggtggaaagtttctggtactagccctgctgttctgctaacaatggtccactttcctccaaacccattgattatttagacatgaaataaatctatgcatctcaactctctgcctcagaaaatgaaatctgtcccaggaaaagttcagatgcagtaacctgctaggaactagggatgcttgtcttaaaaccctacacacatggcaaacactgttttatttagattgagctgattgggaggggtggacctgatagggatatgggcatgatgagctaaagccaccaactggcgctaccttcaaaaatgggtcctaccttccaactatggcaccatacagtacactccaaagcaaggattgtagttaacagccatactttcttaattatctagtttcatcctgaaaggcagacccatccattaattccatgagcattgattttgactttcagccttaaatagagcaacaagtaaacattttttattccccttttcattaatatttaattcattaatgaggacagtgggtaatgttctgtgatatagtactcgtgtgacaaaggagtagtcccaggaaaatttttggaatcaaatcaacaagtatgtattgagttttgacataatacatgaaaatgctgttttggctaagagcagaacttctgatgattagttttgctgacattttaatcttggagatgataaggtagaattataggcttaattttgaccttcacagggattgattgataataacattggaaaaaggtaactaggttatcttagagtctctattagccaaggaaaagaagagaaagtcttcaaggaattgaggcattgtttgagaaaatgattaaataaaaaactataaccacagttttattttgtctagttaaaataaagaatatatagtattatcaagaaaagaatagtctacatgggggttagaataagggaacctaagaaaagatgtgattattgtaccactagctatccatcagagagggagcttgagtcagtcagtataaatttagtctgttcagcacaccctattgtggaggaggaagcagggagcttcaaaactgtaaggcatcagccattaaaacagattctgtgtttgccaagcaaccttctcattgtgaccagagtttgcaggcagagtttccagtgatgactaggttgcatgaaaattttttttttctcatttcaaacagtattttatgtatcagcttcttgtttggtgagcatgtgtaattctcttaagtttaattaattttgcatatttataacaatttttaggaccttccaagtagtaccatctctgtctctagcttaccttcctgtaacttcaacaatgaccatagaggaagatctccaataatctcaaatttaaagagacgatagatagattgattgatagattgattgattaaaacttagtgaaaagctctcagtttaactcttagttcattaatatataataaactaaaatttacaaaaatatcaagtgtagcgtttagacatggattatttgcccataaacaaatctgtttaactagtttaaccttaaacaaaaaaatgtggagcggggtggtgcgagctactagttgaaaggatatatgagtatctcatagaacccaaggtcaggaagtacacatggtggctgtgggagactcggaagtacaaactgaaaagttgagaactaaagtcacatgctctgtctttctcagagttcatgaattctcatctctacttctttctctctgcttctgcatgaaaatagctgtccagtccttgcctgacaatgcaagagcctagtagaaaccaacaagagttccagaagctcagagtttgcagagaaggactctgattggcacttctcaaacaggtgtgcactctgagtccattttgatggcctagggatgacgtcacatggttgctttttcttgggaactgctgtttaaggagattcttagagaaggggacctcagtagggccaagtgatggaacagctttcagaaaaacaggagacattctagatatgtattccaagtgttgtctgcaacgattaaaaaattgctttaaattctgttcagagtaaaataatgaaaaagcaaagagtaggcagattattagggcaaattatatgattttaacgtatgagaagaaagacagatgtgcaatacttttttgtttccttcttagttatctgcaggagtgatttccatattgaaagtattataactgacatcttaagagtgcactagatttgttaaagcctttaaagcctcttacagcaccagctattgaggaacttgccagatgagtttgagaggaagtactgtcagtaatcctcaggtactggagagaagaggagaaattttaggaaactggaggtgggaaaatactaccttatatttttcaaaggggagagagaaaacttgttcttggaaacttgtcactgatacacagtatttaagggagatcatttaaacatatttaaaaagtagccatcactaggtaccagcatggggctatgaaaaagagtcagaccaaagtcacagctacacctaaaagaagacatgtgtttaccttagtagaccaggagactgtgtgatagatacctcctgcagtgtgagttagcaagatatttgagtaaagtgttcagatccccgtggagaagagaaataaatatagtttgaatgatagtgcaattaggtgaaattgataaatggagtgatatcaacctctcagggaaaacacatagctttaaaacagtatttgacctcatattcctccatataaacagtagataaagtggaatcatattagtccaattttcaacatagaaaactgggagggatggttatacacaacaaatgacaaaaaccaaagagggcagaacctgctggaacatgcacctaaaccaacaatataaaatgcaataaatgtaaacatggtattttatactaagttcaactgctgaaatataaaatgggaaacattggacttaacagtaatttggggagaaaaattttagggaattgtgagatagcaatatgatatagttgcaaaaatacagtgccaatataattttagattatacttttaaaggaattatatccagactaagagttgtagcgttgatctcatatattgtccagtccacatctgaattattgtagcagtcctttttgggaaagatgttgacaaaatggggcatttccagagagggataatgaggaattttaatctataaatttctttcgaagcttagattttttattttgctatgtgtaatgcactgtatggaataaaatctaccatactgtgttcccaaggagcatactttgtgtcattccaaccagtgtccatagaaactgaacacttgggtaaaattcactcccctcagtctattgattctgataactgggtttaacagtgacgtattaggccattcttgcattgctgtaaaggaataacagagaccgggtaatttatgaagaaaagaggtttaattggctcatggttctgcaggctgtacaagcatggcactgacatatgcctggctttgggggaggcctcaggaagcttacaatcatggcagaaggcaaagggggagcaggtctcacatggtgagactgagagcaagagagagtggagggtaagctacacatttttaaacaaccaaatctcaccagaactcactgttgtgaggagagcaccaagaggatggttctaaacatgagaaatccgcccccacgatcaaatcacctcccaccaggccccacctccaacactggggactacattttaacatgagatttgtggggggcaaacatccaaactatatcaagtgataaactgtcttttcactgaaaatgtatattgatttctgaatgctaaattaaactttgtattctacattagtaacatattcaagtgtcagcactgtttcttataaattgtaagcatttttccacttccttttatgatgaaaatgagcaaaagaggttttagatgaaagcaggaaaggtcctcaatttattataaaataaaaatggaggccgggcatggtggctcacgactgtaatcccagcactttgggaggctgaggcagatggatcacctgaggtcaggagttcgagaccagcctgaccaacatagccaaaccttgtctctactaaaaatacaaaaaagttagccaggtgtggtggcgcgtacctgtagtcccagctcttcggggggctgaggcacaagaatcacttgaacccgggtggcagaggttgcagtgaggcaagaccatgccactgcactccagctgggtgatagagcgagactctgtctcaataaaaaggaaaaaaaaaaggatagttaaaaaaaatcagtgtttctcaaattgaggatttgtttcctatgcctaaagaatcttcctggttatatttacttcagaattaaggggagagaatcaaaaatgactctttgtcttgagactcctagtgaatggtctaaaagtaagaaacaacctttaagaggagcgagagatgagtaacttccacacaccaaatacacaaaagcatgcacacacacattattgtagattaatgatagtgtatattgagtgcagggactcgcagcctcaaaatgttacgtttttcatagtctgctgaattagatattatttattgatgaagtctaaatataacaaggttttatattaaactacagatgttaaaaacatagctgatacagagaaaatgcaagtgagacatttcatttttatttttgaaatctattttttaagttattggaaaatcactatggaaattcattattctcatattttctgctaatgccaagcacctgacccagatagctaccctgaaaatattctgtaaaattactctaagaataactctaatcattgcaagcctgtaatctgaatgtgagtatatgtgatcagagcagttctacaatgtagctgaaccagtactgtccttggtgttagaggattttaaagctttcttgggaaatgagataccaaagaggagaaattagtcaaaaatatatatcagggcccatccatttaaatgttgtccttcttattagaacttattacaaattctacaccagtaaagtgagaggaatgatgcagaatagggggttttacctcaatacaatgggcatttctttcttactaaatcttaatagcaaggctttgtgtattataaatactacttctgtgtgctctacccagtggcttcatctcacagtgacaaaccagaaaagagctaaactttaagatcctgccttcaggttgacggtggcaaatgaaagcttgtaattgaaggtagctcaatttgtgttgggctgaagctttcatttgggataagtgtccaatccagtcggcccaaaattcagactccctctctgggctgtttctgtgctccagagggtctcttttcctctcttccttttctctctagcatcctggtgacaggaggattgtgcacccttgaggaacatgttttagatggttctggcctgcttacctctgtctctgctgcctcctcctggttctgggtaggtgtgcctgtcttcccgggtatactggcaccctttcatctgctgctgaaggaacccctgctgcagtaacttctattcagttctcttgctgcctttgggaccaacggtcctttcctcaccagacccactatggggacttatctccattttggccctcactggtactgtggatcctctgaagcccgcttgtctacaagagcctgtcgtgtcttaagccttccatcccatagagttgccacatgtcatcctattccttattactgtgacccctggcaggccactggctctcaactcttagctaccatccatgttccccactggaagcatgtggaaacgtctgggctccctggctgcaccctacagccaagggagactgcacagcagatgtggaaagggaagttgtctctaggtctcctgcccaagtacacttcagcatggtttctctttcacatggcaaccaccttctattggatagtctcctccaaagctgggaaatggaggctgcgcacaaatccgttccttcatctgcttttgttaccttctatccccttgttccctccagatttcctacctctccctagtagaagagcttctacttcccttttctgtggaagaggaacatgtcctcctccacagaatgtggagccatgtggacttaacttgttctgttgcagttttgccagtgcaccttaaagtagcggtttctcgttgtctgaacaagtacccggggttctttgtcctgcatccaaaaaaattaaggagcatggacacaagggtgggggtggagtgaaagtttaataagcgaaagaaagcacttcgcagcggagaggggagtccgagtggattgccgagttacagctgactccagaagcttttataagaaactcttctcatctctgtagcagtttgagtaacttctcctatcagtaaagctgtctgtgcaactccccttatcttatgcagctgtgggtatgtctctaggcaagcacaaagcgccacttctcttttctgtataactgtgggtttgttttaggtaagcccccgtcttccctgtgcaagtttctgtggagcccaccatgtatatgcctcaaaaggggaggaaactttttcctgggagcttgctaattatacgaagaacaaacggcttcttttctggacgctgtctgcttctctgtgtgcaggtgcagcctgagtttttgtcccagattgttttgtttttgcccattgctgtgacttttcaggcagaccgcttctacactgtaagtttgccccaactgattttttcttttccctcaccctcattccccacttcagaagtgggaactctaactgctgttagggagattgggcattgatctttctggctatttcttgctggagaggagcattgtgtgaggaacagcagctaggattcctcccgaggctggtttaagggtcctcagaaaaaaggtgcgtttaatgtgtggttccatttactttaccatttggagcttgatggcctctagatgaaaaaaacaatttgggttattagacaacatgtattaaaatgagacaaggaaggaggtaaggatagcttaaaaatcatgaggctgctgacatgccctgataactggtggctatagttaacgtctgttaagattgggtgtatggggcttggctttggttagcttccttggtttgaccttccccaaaaaggaaacctccaggttatgggggcactttatttactcttattacctggcagaatttgtaggataattgcccagaactagaatattgttccagattttgacattacccatccctttctgtctctctgagctgcagccagagatggctggttggtttacaggaataagcagggttagtctaaaatgtaggcaagaacttaaaaatcactaatgagactagaaattaatgaccactgtatgataagttttgaaacataatttccctctctccagtcctcctttttgttaaaaacaaatcatgataggactgagttgtttgcaaaatagactttagttttaaacttggtctgattatttacataagtgcagcaagaatccttatttttacataggccttttagattggctttgatggaactttgttccacaaggaatcttagataggactttctaaagccgatctagacgtggtcatgcctctaatcccagcactttgggagcccaagacaggcagatcacctgaggtcaggagttcaagaccagccagaccaacatggcaaaaccccatctctatggaaaatacaagaattagctgggcgtggtggcaggcacccataatcccggctacttgggaggctgaagcaggagaatcccttgagcctgggaggtggaggttgtgagccaagatcatgccactgcactcggcctgggcgacagagcgaaactctgtctgaaaaaaaaaaaaaaaaaagaaagtgacattctttactcaccacaggttaggaaccctgtacaggggctgtgtagacaaggtatgaggccggttttccaggaggcttttactggctctgcaagtcgaacttgactctttaaagggaaacacaccctttcagtcaaagccttggtaaaacaacgagtttttccaattgtgttttgttgcaaaataaagtagattcttattgcgctgatgcaaacaactatattgttataagtcaagaatacttacaaccagtttctgaattctagagaaaccaggcagagagaaacaaacatgttccaaattttgttcacaggagtataccttacttagttgttaaaagctctagctaatttgaaagaaagtttccttgactctgaaaaacaaaacaagaattagcagtgttcaaagcaaaaatcaaaaagattcgtttagttttctattaggttagtccattccattaactcttgttctgcttaatatttgtaaacatttcagcttttcatgagtcctttacatttttctattatcagaaacctgcattcaagagtacctattaaagttccacagtgattataaaccattttttgaagaagattaaaataagacaacaattgtctgtaaatgacaaaatgtccagggtggttacagtcaagaacatgattgacaaatttggttatttctgtggcatacaataacccaacataacaaccttaattgtgattgatagcaaatattcagacattagaaccttagacatcccatacaattttggacatatgttaatatttttccctaaaacataacctgaagaatattagacctcattttggcaatcccatgtacctaaacatgttaaataatcctgtttacctctcttcagcatgctccagggaccctttgtagcacccaaaagcaaggggccaggaaagacaaccttgagactgaagtttaattttgggaagcctgtgaaatatgttagaggcttaaaacactggatattatgaaataaaattttaccataagtcatttgttttgccaaaacaatgactcaaaaatttgaaaaaaaaaacaacaacaaaaaaaaccttttcattagcccttattactacatgaatagagagccaaatttacccttgcattagtctactattaatgttaaccccagtttttaatgaagccttatagacaatcctattcaatcttaaccagtttgaccatgaggtgagatttttacatacatttttttgtatggttattttataaccctttacaagttttgctgaagagtaggtcagcatcgtaagaaaaccttgttgtgcttttatttcaaagtttaatttacagaaaaaaatatataatacccttttgaatttagtcaatatgttcacacacatagtttcctttgcaagattaatatttacagtcttttcacaatttgcttaaaccttctgctttattttatctaatttaagacaatcctttatctctaggcaaaatggacatttccatgccttcttataatcttttaactaaaaacacattttgctgtttttacacaccttgcatgcaaatccatgttcagtagtctcaattacatgtcataatggtaactcttagcgatttttaactttaatgtaaagcctggtaagttgttttaattatgtgctagatgcagataaagtctgattcctttcagcgtagttaggagcatggtcacttctatttgttcccagaccatactaattgtgaagcaggcaagttgacagtttttaaaaggccaaagaagcagtttgcaaccttaaaacatttagcaaagctagtatctgacctgcataataaattagaccacatttttacaccttgaagacgtttgtattttaccaataattcttgtctgtttttattttaaatattaaagtcatatgaactgaaaggtaccacagcttttacttttactgcaaaatattttatttcagtgcttattattcttaggccaattaattggcctttttatagacttcacatatatatcacatgtatgactacacagacagacagaagaagatccagcagctcagggtggagcccttttacgaacaggggtatgaatatagttttcagggcttaataaacaagcacagccagaagacaaagacagatgttgagaggggcttatccacctctaattccaggggttccatgaggaaaacagggatttctccaaaatgggatttgtggcaccttaatctatttcccagggagtcccaggccaccagaagtcattctagggtctttcacgtatgcatcaagaatgataagacacagtggaaaaaagtaattcagttgactgaaaaaaaacaacaacaacaaaaaaccttttccagaaaaacaagatctatgaagagaaaaacataaaggccttttacatatacccatagctcggatatccactttgaggtaagctgagcattctttaagaaaatcctttctcattaattaaaattttacagagaatgtaaacagtgatcttcatcattccttttactggtttgcaccactaccttttcacaatcatgttcaagttctccagtttcctttgggagaaaatggctcggctctagcaagggcaggttttcctctggaccacagatccctccagtagcaaagcttgatagttaaggaggcgattgtctgttagccagggactttccttagagggcagcactcctgctatattgtatgggttgtaaacagttgtttcccatgggtaacccagtggcctctggcaccaacaaagctgccattgtaactgcttagaggcaggctaaccagcctttagccaccaagttaagttcctcacttaggtaacccactggctgttgagctggacctcaagcttcagccagaattcccagggccatttccttcttttctgaagcatagagactgaatgcttttcctttgggaagactgggggttgatgctttaagtaaggcttgctttagttggttaaaggcaggttcccaagttagtgagtgagttttaactgcttgagtttcgttatgaggtggtataaagggcaagctatttcacggtatccaggtacacacagtctgcaaaatccactaatgcctaagaatcccctcaactgttaaaggaaatgggcatcctttcttcacctgatgctctagtcccttctgataagactagacctaggtactttactgaagtctgacagagccaagctttagattttcagaccctatatcccctttcagctaagaaactgaagagagcctcagtgcctccctgagacttccttggttgggggacagaggagagtgttatttatgtactgcaaagtttcaactcgagggtgagaaaaattagatctttggacagggcctgtttcagcaactttcttcccatattaagggctgtctgagtaataaacctgttctttattgaataaaaaggtttaaagatttttatttagcttttggactatcatggaaagcttggaagagttaataggtttggctctaatcccctgcaagttctccaatatacacatttgaaagagtttccttccccattttctgatgctatcatcatggtcccatttatggtcctccaagggcactggtattttccccacttgcttctccatccctggaacatccaggagagtttaaatacttgggttaaatcttggaaggcctctatacggcagtgaagttggggcttgccccgagtgaactttagggtctgaggactaaaggagatccaggctgcactcaggggtagtgcagacttgaagatggggtgttatccatgtagaaaagaggcaagagaagaggcatccctcagtctccttctcttcagagtgacccaagatggagggaaaggctggaggggcatcccccttcacccccttcctcccgtcctttgggtcccagtgaccatccttcataggtgccgccccatgtttgcaagtatgaccttcatttatggtcctggagaagctagtcagcataactagtcatgctcatctgcttatggccttggcccttcacccttgctggtttcctagacctactttgcccataaggttcccagggtaccctaagggtccaggagagattgtatttgggcaagacaccttaatggaatggaggaagtcttttaatattatctctggcttcccttgctatggccctagtgaaacattgaaatcccagagaatgggaccaattgacttccaaatataaaatcccctttttgtttaaatgccaatgtagttggatgtagaacaggtgcctcagaaaagaacatatgaggccgggcgcggtggctcacgcctgtaatcccagcactttgggaggccgaggcgggcggatcacgaggtcaggagatcgagaccatcctggctaacacggtgaaaccccgtctctactaaaaatacaaaaaattagccaggcctggtagcgggcgcctgtagtcccagctactcgggaggctgaggcaggagaatggcgtgaacccgggaggcggagcttgcagtgagccgagatcgcgccactgcactccagcctgggcgacagagcgagactccatctcaaaaaaaaaaaaaaaaaaaaaaagaaaagaacatatgaattgaatggctgtcctcttgactgttaaagatggagctttgatatttacagatgggtcatggagcctggtccctaatagagggacataggagggaggggaattgaggaactagaggttttcgacaaacagccagcaagactccccatggagaaaaaaatcccatcccactaggtggcgctgtaggatctgagatgttaggtaaaaactctgactccatctatccaggcagaagttagagaggtttggggtttaataggctgtccccagcggaataaaattaacttgtctcataaagaaactgtttaaattcattgggcagtgctgagctttcacgtggagggaagaaataacccaaaaggagaaggaaacaatccaaatggagagggaagaggatattcacttggggtgaaatatccccttatatagtgccatcagtgtctatcattgaggacaaaaagcccttactaggtgaaaatttaaactgatcttgaatttaccctgtctccaggaaatcacaaacacaacaactctttgtcttagtaatcaggaatgtaactcaaagagttgttgtgtttgtcagttggtgtcttagtaatcaggactgactctacccagcaagactctgtctctaggatgcaaaaacacctgtaacattgcatagaaagaagggataagaggcatgatagccctgaaaagaaagaaggaaaatgcagtaggaaaagactggaggtccttgtgccagcaccctgacggctgtcggggactggagataatactgaggggtagccccagccagaaaccttcagttgccctaggacctccttccaatcccatgcaatgtctgggccctttgtgaaaggaaactggattggaatagacaagaaacctcagaaatgaaagtaaaagggtagaggtccgctcttactcacccttctgatgatcccttcttcctgcacctaaatatgttgtagttttgccaatgcaccataatgtagcagtttcttgttctctgaactagtacctggcttctttgtcctgcgtccaagaaaattgagcatggacacaagggtgggggtggagcaaaagtttaataagagagagaagaaatgctccacagcagagaggggagtccgagtggattgccgagttacagctaaatccaaaagcttttgtaagaaactcttctcatctctgtagcagtttgagcaacttctcttatcagtaaagctgtctgtgcaattccccttatcttatgcagctgtgggtatgcctctaggcacgcacaaagtgctgcttctcttgtttaactgtgggtttgttttaggtaagcccccatcctctctgtgccagtttccatggagcccaccatgtatatgcctgaaaaggggaggaaactttttcctgagagctcactaattatggaaagaacaaagggcttctgtactggaccatgtctgcttatctgtgtgtaggtgtagcctgagttttttttttccccaggttgttttaattttacctgttgctgtgacttttcaggcagaccatttctgcagtctgagtttgccccaactgatttttcctttccttctgcctcagttctagagggtatctcaaagtagaaagattgtggggtgaagaatagacattactgagaacaaaatataagaggcatttcaaaaatattatccccaaagcaattcaggaaagaactatggagccgctgttatgtgttatatgctgggaatatggtagtgagcaaaatagctgaggctcctgtctttaatgagcttacagtcttgaaaattttgtagggaagatttctatgcaagggcatagaggtatatacaaaaggatgattattgaaacattattatgaaatcaacagaaatgcccatcaataaggaagtaattcagtagactatggaacagccatactatggaacagccatactatggaatattcaataatgtattgaaacattattataatgttttcattcttattaaaagaattatgtaagtcttatacatgctcacatgggagaaaagtctatacgtactcatctgaacatgtattctatatacataccagacatgtctacatgagtagacaaaatattaaaaactatatacagccaactattaacaatgatttcctctaggagatgagatttgacatctattaggggatatctctcctcctcagaaaagggaagtagaagctcttttagggagaggtggaaaatctggagggaacaagaggattgaatgtgacaaaacctgctgaagagaggcagggagggaactttcacctttatgtcgtaaacttctatgttgtttgaattttgtacaacaaactatgcattactttgtaattcttaagacaaagaatataagtaagaaaaacacataccaatagagttattctggcacacaacctggtttacattttttgaattattatttctaaactatacattggtgaaaggagatggaaacattatacaacacacaacacaaaattatgctctattccagctctgttgtcccctgtcctctgtaagaacgcaaggcctgcagatgttccccaaatggaggtccctaggacagcaaaggtgcccctcaccaccttctgtcaccttcaccccacccttttcctccctccttcagccccttgatgtttctaattccgtcctgtctcccattcaaagtttctatcttgcccttttccccaagttgctatcttctgccttagaagcaagtcccaaatttcctttcatgttttacgtattttcaccaattctggtgtccgttgtaaatcaaaattgctgtctttctcacccagttctgctgttttaagcccagtagttagggtcagaagaagaaaaatgttgcctgagtccccatctgggttatagtttgtttggggggattattatcctcacccatctaaaattaggcataccttgctctgcctgcttcagtttctctccagaaacattacatcttcctacaagatctgcttttccctactactgtgtttttgaacttatcctgaaagagtgtttggtccctcccaactttgggttacactgcaaagtactctttcagaatcaaaatgagtctttaccagtccctgtttggggtttcttctatttaggaagaggcttctggaaactgtactcctgctacagttgtttcaaatagttgtgtagaacaactaagctctttagctaatttaaaagctctaaacaatattatcactttgttcattccacagtaaatttctgaatgcttgctatatgcctcaggtcaacctgtttaatatctttctgaatattttagtaaaacatagcaatatagtgtgtttagctttcaaacgcagtaatataatggtttatttagcaagtgaaataaatctcttgtgccaaaagctcatttcaaaaaggaaaataactaaggtccaggtcatgaaaaaaaaaaaaaaaagccaaccacctgatagctgtaaatactatcttaagtgtcctcagcataaattcacaaattaagtctttttattacagaataagtattggttatgcagtagctttacctaggagtaactttatctcataacagcttctctcttttatcttgcatttctgttaaattttgaaggctatatttcattcacttaccgtagttaagtcgatagtatgtaatccaatcagcaaatatagtcagcttggagccaagcagtatagattacctgtaaataaatatgatgaaattttctctttacagatgcaagtattggcattatgatgaaaacttgctcacttcgagcgttgtcattgtcttccataatgaaggatggtcaaccctcatgagaacagtccacagtgtaattaaaaggactccaaggaaatatttagcagaaattgtgttaattgacgatttcagtaataaaggtaatggctgtgaaactcacattttgtctataaaataagttaagcatgaataattgcaaaaaggtgatttcaaaataattagctttaaaaaattaatagcatctattgatagcatctgttatcaacaagttgacactgtgccaagcattgtatgtgagttattttgtttaatactaacagtaatcctttcagtggatatcattatgtccattttacacgctcagagatgtacaagtagtacacaaaaatttggttgtacacaaaaattcagtaaagtataccactgattataatgttagaagcgaagataaacataggtagcatgaaaatatcgttcaaaatggctttataaaaaagcttcctccaaaatttaattgagaattcttgcagtctggataaacctttgctggttttgcaaggacatgattagaatcttgaaactgtacacatatgttagcacgaataaatagaaatatggcctatttttcctttcatctctgtgcagctgatccttttattaactaatcatttttaagtatcctagagaatgtatagctttaaaatttttagccatatcaaatgcctttagagtagaggctttaagatactttaaaacttttcttcagttctcatgttaatgtcaaatctaaaagcttttaggcacaacattttatgtatgtccattttgtttatgtccatctttgttgtgaatttctataacaataatgttttcattaaaatactatttctatctcaagacaaatgatactgttggtacaataataattgagatgaacaaaaatctaaatgtataaaataacttttcaaaatcgcccaattttactaattttaagaacctctatattattaataccagtaaaagtttatcatatcctaaaaaaagtgaagatacaccaaaaggtatttagcatcctaaaataactgctttgccaaagaaaagaacacaattttggacctcagagtattctgtatttttttactgttgtcttttttttttatctttacttcttttacaaatctctaatgaagacaatcatgcaggtcccttgagtttagagtaggcagagaagtttgggctacccttgaatgaaagtacagctttaattagttttttcaatttcaaaacaacctgaaaatctcagtcctatccttagtaaaattatatactgtttggttaatcagacttgagtgataatttggtgtgtactttccctaatatattcagaaagtaaaactttaaagatttttcttttaaagactaaatgcatataaaaggagctaactcgtaatagcacttgggtttctgggcatcacagtatcctctataaaggtttggagcttttaactggaacaaattcctcacatacgtgtgcatcagctaactgcgactgagttgggccgaagtaaaagcaaacccacactctcagtggctcgcacaacaaagggttagcttttgctcaaactacacggtccttgtgggtcagcctagctctgcaccccatcctcaccacaggacccaggcgtgcagagcagcctcagctcagacactgcctgcagaggggcagtgggaaagaagacacacacaaccagcctcttaatgcttctatgcgtgtgactgatgtcatttccacccacatcttgttgaccaaggcaagtcacacatgtcctagcctgcagtcagtgggttagggaggataattttcatccgaggaagggcagtgaatattttgagcccttaacacagtgtaccacagtgtgaaatacaaggaagccagaaggtattggatgcaccatttccccctttggtccatggtaaccaagaatcaaaacttgaaacataggccatcaattcatttctgtccataaaaacttaagatgtgtttaacttgtatatgcaaaaaatcctcctaatggaattcaaaaaggctttaaaaaaataatttaggactgcactggactttaaaaaagaggataaaggctttttttttttttaagttgaagggaaaattactcaggttttctgaggggaaaaaacatgattaagcacgagaattttatttataatacttattaaaactgggtaccaaaatagaaagttttttttctcaattccagatacccacgtgtatcttactaataataaatgccctaaaatgagtaaaatattaagtatacagtctgatttgcccatttagccactaactcatctctaaatacagcaattttcctgtgattgcatattcatgggccaaatttttaaacaattttaaaacaattgaggacaatgcttgtgtcctcaagaagcatcttttaaatgatctgcagctcattctgaccgtggtgagctaatttcatgggctcatagtgatacaaacaaaagctgttctcttgtaatgggaagccaaagatggaaattttgccaaatgtgtctggtttttataacacaaaacttcctctactaaattacaaacacatatatacatatatgtatgtataattagaattatatttataatgtataattatacacttgatgcttaagataaagagaaaatgagatttttttcttatttgccaacttggtgggaaccatattcatcataccaaggttacagctttcaacactgattgtggttggggaaagatgtcccagaaaaaaatgttaaataacctataccctgtgtggattccagtgcaattgtatagtattgttagtaggcagtgcatcttcagaaaccctaaccattgcttctgtcaacagcaaacaaaatgttgttcctgaaagcgttcagatttgacattaacatgtgaacaggaacaaaaattttaatatgtcttaaaaccttaactgtcaattcgaataatcattgtttagaagggtgtttgataattctcagactaaccagttctctgtaggcatagtaaactcaaaattaacttaaataatatacttcgccttccttcttgataaaacgtgcaatctggtccatgtaaaattactgtctacccaatgcacctgtattcttgtttcctgagaaaaataataactaattggtttctattcgtctaatttataatatcgattgatttttcttaacagaacacttaaaagaaaaactggatgaatatattaagctgtggaatggcctagtgaaggtatttcgaaatgaaagaagggaaggtttaattcaagcacgaagtattggtgctcagaaggctaaacttggacaggtaggaagcatttgatatctacaatgtcaacattttgggtttggtaactaaatcatacacatttttaatcattcttcagtttttttaattgaaatgagaatgctggcttaaacagataacttatgtgtcagaattgactataatgctaatttttattagcatctaattttaaattgtgtgtaatatatgatgtaacgtatatgaggagtattctttcacctgcctcttttttttaaggttttgatataccttgatgcccactgtgaggtggcagttaactggtatgcaccacttgtagctcccatatctaaggacaggtaacattaccttgctttttttctttcctggttgaaagtaaaccttgtcctagaagggcaaataatattttcatcctttgattccagctccattcagtgcatcgagtgtgctttagtgttatccctcatctatttgtttccttgggtggagctagactgatactgtggactgatttaaatgtaggcagtctggcatttgggagaaacctagggttcctcactcaagaatcattttgtggttgggttattaagacccctctatctccaggcactttctctaagagttatatgaattgctccctctaaactggggtgagagttctaaacacttgaggaaccatgctttgatattatacctgttgatttttgtgccttttaaattagtactttcaatagtaaagaccaggtgttacttgtgtcaaggttttgggttcctatagaaactttaaagtttagaaatagacaactattccatggaattgtgacaatcaccattaaatttccagaaatgtctaaaacaacataaggcaccatcagttttctatctccaaaagccttccttgcttctagtccataattaggaaaataaaacacgtccatgtggcaaatggcaaatggcatgaatcaaaggcagaactttggaggatttaatcatgagaggatttaatgtgaaggccgaacatgaacatttttcacatgctgtctgatttaatcctcacagcaaccctgcaagatagagattattagccccatttgactgaagaggatactgaggcttagagaaattaagtaattttccccaaatcagagagctaataaactgtcagaccaaggcctccctgggaaagtttacactgcaccatgtatttaggaatgtgaaaatcataagtgaggacagttaactgaccaagtgtcaggtaactttctctaggtgaataccagcaggcttctgggcagtgaggaagtggttttccagattccagtggcagattccacaaatctgacaatgaccctccagttcacactctggagagaaggaagcatctttctggactttacttcctccatattaaagttctaagcactgtaggttttcccttttccttggtttttaaacttctgaaaagcagcttgacctggatataaaaagctgtcattttcattttaggaaaatagattttaaaatcctttctgacgagatgaacattgtaacaagcagggtaccagataatctttgtaatgtcactttgacatctaattggttatagagtactagcattttcgtgaagcccaaatataagagattttttgatccaaattctcagaccacttctgaagttcttcagcaagttttgagggattttttttgctttttttttttaaagcaacaataccttttttttttgtttgttttgcaataaaagctgttttctgcagttagaggagtgaggaagatcaagtaaaagtacagaaacacattttcataactgttcccaagaaatagcaacaaagggttgagagaaccgctaagaatgtggcaagtactatctgtgaccccacacacacgcacacgcatgcacacgcacacgtgagctttttcatgggtgatagggaaaataacaggcaagaaaatcttataaataaggtaaaattaccaaaagaaagttgcctttaggaccaaagcgaaaaggagaaaactctattaagctcagtgatatagttctttgtccctgacatttgtctgtaagcctagggggaagtctcctctctcctgcccttacgtaaacaggcttttcggcttttatgggacattcatttactctatttcccattagatattaaagtcccctagtgcacaaacaaatcaacaacaaaaagagataacgtagttaggcatgctgaactagtcttgggttcttaaatgctttttcattttctgtaaatgtttcagaactacatgtactgtgcctctaatagattacatagatgggaatgattattccattgaaccacagcaaggtggggatgaagatggttttgccagaggggcctgggactggagtttactatggaaacgtattcctctaagccacaaggaaaaggccaaaagaaaacataaaactgaaccttatcggtaaagactattactttattttcttatgttgaatgtttatctaagttcttttttttttcttccccatgaactcgtataaatgtgtgggtccatacatacgcttccatttgatctttgctgccatcaacacaatacagaaccatttgcactgtgccgcttatagatgtcataaatggcaacacatatgaaattataccccaagggggtggtgatgaagatgggtatgcccgaggagcatgggattggagtatgctctggaaacgggtgcctctgacccctcaagagaagagactgagaaagacaaaaactgaaccgtatcggtaatcactaaatcacttacatatttttcttttctccagttgctgctaacctattaacctcttgccaagctaaagattcgttattaaaactgtagatgttgtctcagattctgaaagaacatctttccttacactgtttcagagctttcaatctgctccatttgctccattgtaattgcttttaccctaaatgtgatgtccactactgagacgtacacactttcattggggaaagaaaaataatgtaacatggcatttgttccacgtacaagtgaaaaaaagataaaatcttagttatcctgtcctactggattagacatcaaattttattcttttgatgacagtgtcattctataaatttaaaatacataaattactttaatccaaccaagacttttatttccacgttcatgccgtgggtataatgttaacaatgaagggcactagcaagagatttctgggtttttctccccttttgctgttatgttaactctcaaatactaattttgtactagttaaatctgatgaatcacaatacatgactttaaaaaatgttacatagaatcctttattgcttcattctcagaaaagtgattgattaaaagaaaactctattcaaaaatcagcttttgtcccttcttgtggttctttcagtagaacaacttatgctactctcttcttttgatcttgtaattagaacattttactgtctctgtaaaaagtgaccccaaatgaaatgtttgctcaagtgttagtatagccttctcctgaatgtgtctaatcttatttttctgatcctatggttctgcttttggtctctctctccctgttacactgctggtgatgttagaactctgttttgggaaggtgcttccaatgttatggaaacgctgtgggatttgggcatgtcatgatatcaagatactgaatggcaaacataaagaagttatagcacttaattaatcatagtagcttaattggacatttaccaaattttttttggtaaatttcttattcagaatagtccaggaatcaactgcttacgtgcttaacttaacaaataactgtgggagaaaaaaaataaagggtgctgagcaaatttatatttctgttaattccataggccagtaaagaaaatttttaaagtgacctagaaaaattaaagggaggttatctgttgattaactcactggtgaccatgttaagatgcattttcaagtatatactgagatgaatgggaacatatttgaagaaaaataaacccagctgccgggcaaggtggctcacacctgtaatcccagcactttgggaggccgaggcaggcggatcaccagaggtcaggagttcgagatcaaccttgctaacatggtgaaaccccatttctactaaatatacaaaattagctgggcgtggtggtgtgtgcctgtaatcccagctacttgggaggctgaggcaggagaatcgcttgaacctgggaggtggaggttacagtgagtcaggatcacgccattgcactccagcctgggcaacagagtaagacttggtctcaaaaacaaaaaaaaaaagacacagctataacggaataatcttaaatgacagttaaataaaggtgacatgaaaatatcacctaaaatgtaatagtgttgttactgtgttaggcagcatattttaagaagaaaaagcatgagagaacaacttttttctgatgctattttcttctagtattgaaaatatttcttgattcattatccactcaacaaacgtttattgaatgcttactgtatgccaagcactgttttctggggatacatttttaaagatatgtttcctcattgaatttaaaatacagtgaatcagacagaaattaaacagataactgcataaataaccctaaaattagcctggtgtggtggcacgtgcctgtagtcccagcaactcaggagactgaggcagagggattgcttgagcccaggagttcaaggcttcagtgaacaatgattgtgccactgtactgcagcctgggcaacagagtgagaccctgtctcacaaaacaaacaaaactctggaacagcagctgtgataagtagtatgaagaaaaatcacagagtacatgagtttatggaaagatgaacctaatccagcttgggagatcaggaaaggcccttctgacaaagtgtcatttaggctgagacctgaaggatgagggaccaattctgtggaaaaggagaaggaacatttcaggatcgtgaataacatgaatgaaggccttaagacagaaaggaggctggcacgttcccggtgggagcagagccgtgaaggactcaacgggaagagagtccatggtgagcccagagagccgggagaggctggtatcatgcaggcgcatgtggaggagtctgctctggcccctgtgtgattagccttgagcagggggcagaagacaataaaggacacaagctcgggagatattggaaagtccaagcagtgttggcctggtctaggctggtggcagtgaagttggaaataagtcagcagattcaagatgtattttcaaggctgggtgcagtggctcatgcctataatcctagcacttagggaggcctaggcaggtggaacttttgagcccaggagttctagaccagtctgagcaacatggcgaaaccccatctctacaaaatacataaaaaggtagctggatgtgttggtgtgcgcttgtagtcccagctactcaggaggctgaggtgggaggactgcttgagcccagaaggtcaagactgcagtgagccgcaatcatgccactgtactccaggctgggccatagagtgagactatgtctcaaaaaaaaaagatttttttttcaaggtagaatcaatggaaccttgaaataggttccattgaacctatttgagtagattgaatattatgtatgatgatgaagttaccctaataatactgagtaccctaaaatttaagaatcatgatggattagtaattaattgttcaggggaggggagcagggagcaagataaattctgctgtaatttctcccaatggtgggagtgacttgtccctaagaagctaccaaatcttttttctcttggacctaaaaagtgtccaatttaagatccattcaagaagccccacagatacacaggtcacccttttgcattcctacctcctggcacagtaaatatctatatctaattctcctgtgtcatttctgtgctacatttgcaaactctgaatgaactgtggttgttctacaatgatttacactgttatttggcgagcccctgagctataaaattaaaaaatgacagactacttccatggtgtatggttttgttcacccaagaatgactcataaatcaatgcaggagcagttagcagaccacggctgtatggctcagtgtttttaagagtgaaagagaaaattctattttaactaaaactaaggcttaatttttaaatccacagaggtaccaaggcgccctctaatggtgaactcaaacaatgctctattttgtaatgagctacagtttcagttagaaattgtggtaaattcgttagggaattatgaacagatttttttctttttttgtaaaggctttataatttcttaatgtttggccatcagttttgtctcttctatgcattttcaggctgtattctacaaggcttcttgcctattggtgaagggttattgggggtttgtctgtaatggttattgcagtgtttctttttcttaggtccccagccatggctgggggattatttgccattgaacgagagttcttctttgaattgggtctctatgatccaggtctccagatttggggtggtgaaaactttgagatctcatacaaggtaacattttatttcaacagatggaattctccaagtcgttactaacttctgtggctttcagataaagctagttttttgtgggggaaaaaagcccacaattatatcatgcatttctccaaattgtatagaatgatttaatgaaaatggatgcctttgaggaaaaaataaggcaaaatgcaagctccaaacttaccatatatttacagggctcagctcaaaattgtggctagcaagctttagaaatgaaaatatctacccccacaccccaactttctatatattggagctttttattatagaagcccttggaagaatctgcatgcgttagggccacaattgaccacccactgacacagtcaccctttaccactgtaggacatgattcaagacagaagcagagccccacaatgactgtatcctcaggctgactttggcgctgtcttcctgcagcatccaccctgttgttgaagcagtctgggagcaatactatcttccatgctccagcccccacctcaacccctattcctacccccattttccaaaagaaagagagagagaactatatcagagtgtgagttaaacaggtattcattacctcttgtcttaaatgtcctgtgcgtagcactgtgagggatagaagaggagtaaaccagttgttgctctcaaggaacttgataagaagatattagaattatacttaaattcataatacaagaaggcagaatggcattcagttggtgtgcttaaaaaaccgtcggccaggcgctcatgcctataaacccatcactttgggaggccaacatgggcggatcatgaggtcaagagatcgagaccatcctagccaacatggtgaaaccccatctctactaaaatacaaaaaattagccgggtgtggtggtacacacctgtagtcccagatactcgggaggctgaggcaggggaattgcttgaatctgggaggcggagattgtagtgagccgagatcgcaccactgcactccagcctgggggacagagcgagactccgtctcaaaaaaaaaaaaagaaagagcgagcgttatgctagatgcagaatttgcggcagaagtaggaagatgggtatgatgttagtaagcacagataagggatgggagggggacttctaagcaagtagcatggggaaaagtacaaagaagagaacacaaggaacattcagagaacagcaaggagcaaactttggcagaatcaagcaacatgaataaggaagacatctaagaagataaaatgggaaggtgtattagggccatattgaagagagcctttaaagctgagttaagagatttttatttaatttgataagcagtggagaacgatcaaagatattaagcaagggaataacatgacccaaagctgcccttcacctataataatctcttgctataaataaggatagttgagtagagagaagccgaaggtgaagaagccagttaggagtttattataataatcacccaagtaggaaatatattagcaatggaaatgattaatgagttaggaataaagaatccacatgactttgcaaggttatattgggagaaagttgctaggggctatgagtacacagtaagaggccccttagtagcagtttattattaatactgtattccctgttgccttcttggttgttacatgagcttttaaaagcaaattattttaggatttgtttagtttaagaattctgtgtggacactgtatataatttagattttagatttacacttacaagataaattttcagttatggtttatgtttgtatttgaaacaactttcacaacgtgtttttccttcatagatatggcagtgtggtggcaaattattatttgttccttgttctcgtgttggacatatctaccgtcttgagggctggcaaggaaatcctccgcccatttatgttgggtcttctccaactctgaaggtgagttttttggataaaaggggaggacagggaactaacatttatgtaccacatgctatagtagttacttaacaattgtcagcttattgagtgggctcttcagcagtcatgttgattctcacctttaacttagctagacttattcacgaaatatcttattgttctttaagattattcagctgaagcaggaggattccttgagcccaggagttcaaggctgcagtgagctatgattgcaccactgcactccccgctggatgacagaacgagaccccatctcttaaaaaaaaaaaagattgcaccctatttttttaattgacaagtaaatattgtatgtatcttgtacaatatgatgttttgatatatgtatacattgtggggatggctaaatctggctatttggacatgtattacgtcacctacttgtttttgtgctgagaacacttaaaatttgttctcagcaattttcatatatgtaatatattataaattgtagtcaccatgttgtataatagatctcttaaaactattgttcctaacagaagttttgtgtcctttgaccaaaatcagcccactccccccaatcctcaccttctggtaaccaccattttactatctgtttacttgtttacactccacatgtaagtaatatcatgcagtgtttgtctttctgtgcctggcttatttcatttaacataatattctccatgttgttgcaagtgacaggatttttttattatttaagggtgcatagtattaataccatcatgtatatataccatattttctttacccattcatctgttgatggacacttagcttgattccatatcttgactatcgtgaatactgctgcaatgaacaggagtgtagatacctcttcgatatacagattttatgtcctttggatatatacctagtaatgagattgctagatcagatgatagttctatttttaatattctgaggaacctctgtactgttttcccataatggctgcaccattttgcattcccaccaacaggtgggaagggtatcttgtggtttaatttgcatttctctgataattaatgatgttgagcatttcttcatataactgttggctagttgtatgtcttcttttgagaaatatctattcaggtcctttgcccaatttaatcaggttgtttccttactattgatttgtttgagttccttctatgttacggatattagcccttaccagatgtatggtttgcagatgtagcctcccattccatagattgtctactttgttaattgtttcctttgcttacagaagcttcttagtttgatataattccattagtctatttttatttttgttgcctgttcttttggggttgttacatccaaaaccaatatcatggaattttttcttttagaagtgttacagttttaggacttcacgtaagtttttaatccattttgagttgatttttatatatggtgtgagatgaaggtctagtttcattcttttgcatatggatatctagttttccatttattgaagagactgtgttttccctcatgtgttctcagcatctaccttgaaaatcaattgaccataaatgcgtggattatttctggcctctctgttctgttcttttggtctatgtgtctgtttttatgtgagtaccatactgttttgattactatagcttagtagtagattttgaaatcaggtagtgtgatgcctccagcttcgttctttttgctcaagattgctttagctattcagggttttttgtggatccatatgaattttaggatggatttttttatttctgggaaaaatgtccttggaatttagatagagattatattgaatctgtagtttgcttttataatatggatattttaataatattagttctttgaatccatgatcacagggtatctttccatttattttgtgtattcttcaatttatttcatcagtgttttatagttttcagcatgtagattttttcacctcctaaatattttattgttttgcttagctattgtaaatcggattgttttcttagtttgttttacagatagaccaccgttagcatatagaaacactactgatttttctatgttgattttcctgcaactttattagatttgtttattagttctaacagctttttaatagagtctctttagggttttgaatatataagattatgtcatctgcagagacagtttacttcttttctgatttggatgtcttttctttctcttgtctagttgctctggctaaaacttccagtagtatgttgaatagaagtggggagagtgggcatccttgtcttgttcttaattgtagaggaagagctttcaacttttcatcattgagtataatgtttgctgtggacttgtcatgtatggcctttattgtgttgaggtacaatcctcatgtaatttgttgaagctttttacattgaattttgtcaaatgcctttttcacatctattgagatgattatatggtttttgtccttcattctgttaatgtggagtatcacatttactgatttgtgtatgttgaatcatccttgcatcccagggataaagcccacttggtcattgtaaatgttatttcaattatttctctgtgtttgattgaaggtaactgagcttctgtaaaacaattatttagaattatttatccaggtctactactgggagattattgtgatcttctagtggtattatgtcctcttcatttttcagtttcttattgacttacattaatgcctgtgcattttgtggaccagtcacctcttgcggactttacaggctggtttcagcttcctctatgggggaaggaaggtgtgagggtacttgcttggtgggatatagcagttctgggactactgaggataccaggtatatattccctgtgcagatcagcccaccaaggtcagtgttggcaaagattctagtgctcctcagtggctaatgctgtagatatctatagtggcagtgaggcatgttggggtctttgggtatggctgccaaggtcatcctgatttttctctcattgcagaagttgaatgccccttggcactggttctgactcataggctcacttgcagcggcagtggcccttgtagagtggctggggagctgaggactgaagcacaagcatgagtggagagactatggctacaggatcttggacagtttaaaaaccccaggacttagggcacagatatttcgctactgtattgataacagaatgcgaggtaccagatgtttgtgagacagctgaagtagccaagaatgggagcacagatgtgctcagagttaatccagctctagggacagagtggtgcctaggtctctatggcagctgagctggtgcttgggacataggtacctctgctgccatgttggtagcagtatgtgaggcccagatgcttgtgaagtagcttttagagccaaggaaaggagcagaagcatgcgtagagttagagcagctcctgagttggggtgggttctagctctctgttgcagctgatccagggcctggagatggggcatgcacaataaaggcgtggctctgaggcctggagcatgaacgaactatagcaatggttctagtgtcggggcaggcccagtgcagccacagagcctggggctgcaatgtggacactagcagaacaactgtggcttcaggatcagggctcactgggccatgggagaattggcagagctttgcccaaagtaattcaagagtagctgctgcttggatggtggtgaatgttcagatgcatctccctctctggggttccccagcagaagggctgtcgtttacctcagtggcaagtgatgccagtgtcctctagggagcaggcctctggaaactatggtagttcctgctgcatggccgataccaatagcatctgcctttcttctttgttcctagctatctccttgtgcctcaggtatgtagacctcacaggtgatcctgtcctatgtagatattcttcgtttcttttcctccattgtgttgctgcagattcttcaatgggccctggagctctctctgggctatttgggtttgtgaataggtgtctgtatttgttttttagttgtgggggaataaaggctggtgtctcctactttgccatcttggtgacctcacctcccattatatcccattctgattaagattcctatattgaatgttctccatgaatacatttcaaataaactcaaaaaagtctgacactgtgtagggaaatagttgaagggaaaaatactagcttctgttattcacacatgagtaaaatatggtttggttttttttttaatttagataatcatgttaggagtttgcataataagcaaaatcgaatttttgaacagtgcttacaaaagattaatatctcttgtccctcaaagattgaaaagttaatgtgaatatcctttgtcctgttgtattctgcctccatattctctatctctgtcacataaaatagaggaaaattggccaggcacagtggctcacacctgtaatcccagcactcggggaggccgaggtgggaggatcacgaggtcaggagttcgagaccagcctgaccaacatagtgaaacccagtctgtactaaaaatacaaaaattagctgggtgtggtggtgggcacctgcaatcccagctactcaagaggctgaggcaggagaatcgcttgaaccctggaggcagagtttgcagtgagccgagatctcgctgctgcactccagcctgggcaacagagggagacttcgtctcaaaaaaacaaaaaaatagaggaaaatcccactgactcttttcattgtgacatccaaattgttctattgtaataaatattttgctgtgattatttaataaaaatctcatctcctatgccataaatatagaactaggattgataatctatattttaccaaaactcatgaacctgcagaaaaacaaaacattggtttttaaaacattttggaaatgttaaaaaatattttttgaataaataaaatgtatttaacttaaactgaacgggactgttttagtaggatgagcatcctcccgggcttctttcccagtcacacgtttattaggaaataaatcacagttctagttccttctattgattctccccattccagggagtgtacgtgctctctctcagcttcctcaaatgagatatgtcatagtcgccgtcttccaagagaatgacagtttctagctggggaggacagaattagaagtagtgtagtggtgaatgatgacctggtgattatccagccatgttggggtctcccagttctttgacatttcatcccagactagtgacacttaggggtggcatttatttatgaaacaaaccaaggaagcttcatgcagacatccagatgtcccactgcttggaggacaaagacctctatccctggcaaaacaactttgaggtttatttggttgggctgctttcataagttctaagaggcatgcaactctgatgcccctcattttctggaacgcttaaccaagtcaagtttattgttggctgtagacacaacttgggacagttcataaaatgggaataggtaataagcagacagctaagctttcagagccagaacatccttctcattggccaaatgaagccccagctacaacaggggatgagatttaaatgtctgtgataaaacaaaaatagcaccaaattaacaccaggcatgattgacattgcaggaaattccccttggagttggactcaacaatcacgaagaattgatgaaaagccaaattgactcaaaaaaagtctattctgaaagaaaaactaaaagagctgagaggtggctatttatcctctctaaaaattagctatatataccatacaaactacccagtaagtgtgaatttagcatacacttagtgagtacccagcatgtgccaggcactttcttttctccagttttgacagcatctacttgagccatcagggggccagtggccaggtctgtttctccagctcatttgtctcctctgagcctcaaaccttctagagttatcctctttgatgtcctttagatcttccactcaacagaagtcaaaactgacctttaacttttcctcaaaagtgattccttccactgtgttctctatttgcccgtgaatgaaacttagggaggcatgtagagttgttccctgtccctcccccttaccaagtgctggtgattctgcctcacatatagctcttcaatccatccctttctatacttagtgcagcccctcaaatctctcccatgaatagtaaatagcctcctacttggctctttgccatcaagttcaacccccttcagtctaccctccactcactaccggtgtcattgatctgaaaattaaatctgatgtcacttacctgcttaaaacgtttttatggttgtcatctcaagggtaaaattcaaagttcttttaaaaataataatattaataatagctaacatatggtaagtacttacagtgtaccaggcataaatctaaatcctttatatagattaacttcttaattttcacaacacactatgaggtaaggactatatcctcatctaatttttttatgttgttgttgttgttgttgttttgagacggagtttcactcttgttgcccaggctagagtgcaatggtgcagtctcagctcactgcaacctctgcctcccagattcaagagattctcttgcctcagcattccaagtagctgggattataggtgcgcaccaccacacctggctaatttttgtatttttagtagagacagggtttcaccatgttggccaggctggtctcgaactctgcctcccaaagtgctgggatcagaggtgtgagccaccacgcccagcctatatcctcatcttaaaatgaagaaactgaagcaagttttctcccagtgaatactgcattccagtttttgtaaactacttgctatactgcaatacaccatgatttgtcatactgcatttgcttttctctttgccctgaataccattcccacctaattaaccactccttcgagatggggcaacacagtgccactctggccctgtccatctgagaaaactaattgctccttctttttgttgccataatcttacatgtgtatacataactcttcaggtttgttcatgtctagagtacatgtactgtgtctaatttcgtatggatttgcaaagattcagaatgtttagtggtatattagtctgttttcacactgctataaagatatacttgagactcggtaatttataaagaaaagaggtttaattggctcacagttctgcaggctgtacaggaagcttggcagcttccgcttctaagaaagctcaggaagcttccaattatagtggaatgcaaagggggagcaaggcgtctcacctggtgggagcaggagcaagagagagaagcaggaaggtgctacacacttttcaccaaccagatgtcacaagaactcagagtcacaaggacagtgtgggcatgggggtggggggtggactggtggtaaatcattcatggaggatccaccccatgaaccagtcaccatccaccaggccccgcctccaacattggggattataattggtcctgaaatttgggtagggacacagatccaaaccatatcaagtggtaatatcgtatgttcttttatcatgctgcttataacagctttttttaaacccatgggcttttgtgacaacaatgcatctaggggcatgttcaccctttgatagttatcttgttgcctagaaaacatttaatctgaacactaggtatttcttttttgaatgtaaaacatgggtcggccacatggctgacaggccaaatccaaccctttttagtaaatcaagttgtattagaagatagccacactcatttgtttgtgtattatctacggttactttctcactacaatagcagagtcaaatagttgccacagagactgtatagcccaaaaagcccaagatacttactatctggccctttatagagaatatttgctgatgcatgatgtacaagattaagggattgagtattattttagttcatttagtgttgctacaacagaacacctgaggctgggtaatttatcaagaaaagaggtttatttattcacgattctggtggtttgaaaattcaggcttgggcagctacatctggtgagggccttatgctgcttcagctcatgatgggaagcagaaggggaatgcacatgtgcaaagagatcatcacatggcgagagaggaagcaagagagagaccaaggaagccagactctttaacaaactactcttgtgggaacgaatccacttctgtgagagcaagaactcaccccctcacctccataggaggccattaatgtattaacaacccaaactcctcccagcaggccctgcctcccagcattgccacattgggcatcacatttcaacatgaatgttggcagagacaaatcacatgcaaattatcactcaagtgtgtaccaatttggtcacatatattcatgcaaccattcattcatcaattaaagctttaaaagctagatatttgtcagctatcacagtgtcagcatattttattgctctatagctgctttttcttaaagtgaaccaactggggtcgggggcaatggctcacgcctataatatcaacactttgggaagccaaggcaggcagattgcttgaggtcaagagttcaagaccagtctggccaacatggtgaaaccccatccctactaaaagtacagaaattagccaggtgtggtggcgggcacctgtaataccagctactcaggaggctgaggcaggagaatcgcttgaacctgggaggcagaggttgcagtgagccgagattgcgtcactgcactccatccttggtgacagagtgagactccatctcaaaaatatatattttttttaaattaaagaaaggaaccaactggggaaaatacccagtccatttggggttatagtaaaatagttctattatagttataacaggatcaataaaatcacctgcaaaaatgtgttttattaaacagagcttttgtttctcatgatggtttctgaaatgatatttttttccctacacttatcaacagaacgattctaatagaaagagattgtaggccaggcacagtggctcacacatgtaattccaacactttgggaggctgaggtgggaggatctcttgaggccaggagtttgagaccagcctgggcaacagaatgagactccatctacacaaaaaaataacaaaaattagccaggtatagtggcatgtacctatagtcctagctactcgggaagctgaggtgagaggatcacttaaacccaggaagttgaagctgcaatgagccaagattgcaccactgcaccctagcctgaatgacagagcaagaccccatcacaaaaaaaaaaaaaaaagaaaagaaaagaaagagattattatagggaaagaagtacagtgtccagccaagctctcataaactctctctgagattcaatttattcttctgttagcagaatagaatacattatctcagcatatatgatcttccagctcagggatatcaggttttgtacaatactttttacttaaatacacatgatattttaatccttggcagatgacatattagagtcattaacttgcatttgttgtttaattaaatgccaggtcctgttgaaatgaatttgttatgtgtaggccattttcatgtgtctaatataggctgtttatgatatgacatttgtatttttataacgatatatatatatatattttttttttacagaattatgttagagttgtggaggtttggtgggatgaatataaagactacttctatgctagtcgtcctgaatcgcaggcattaccatatggggatatatcggagctgaaaaaatttcgagaagatcacaactgcaaaagttttaagtggttcatggaagaaatagcttatgatatcacctcacactaccctttgccacccaaaaatgttgactggggagaagtaagtagtcacatctcaaaatgtatgtgtttgtagactgagtttgggagaaggcagagagaggtggaaatatgtaagagggaagtattcttggggaaaagttggggtaaaaactgtctgataggatctaccacctttccactaaacagctatagctgccagaccagctggccaccatgctgtctcctggcagcctttgctcattggccccctagcctgcaagacatccactcttcactccagctcctggcgcctccatgcctcttactccaactcccttccttaactaatttcaatttatcttactgctctcaacttagagatcaccaatactgaaaagcccttcttactattccccacttcatcaaaaagatgcagttctatgttctttccaggggttctcacaacacccaaaatcacctatctcccaaccagtctgagtgcttcaggaccttgatcacttgtgtccaggtggactgatgcagggacccatatacagtagatactccaacaatgcttttcaaatgaattaaaaataattaaaatcagacaaaagcactttgacaatcagacattgtcatttctttgtttattcaaacttgtcttcagactcacttctgattgctccctgcagccccgctgtatgcctcacaggtacactaaacctgccatgaacgttcaagtctacatccctctgcttaattatgttcagcaaatattggttgagggcctactatgtgccagtcactcttctagacagaaaaccagagaagcaaagtcgtttttctcagggaactggcatgctacctggggagagagaccaaaaaagtctgagaaaacaaaaatgataatgacagatggtgataaatgataatgacacataatactgtcaagaggacttaagggcagggtaaggaaagcctctctgaggaggtgacattcgctctcagatctgaatgataaagagtcagccaatcagagagtggagatgaagggaagctgaccaactgcggaagcatagttcatctgggagtggattccttatgggttggtgtgtgaagggataagggccagaatgacatcgaggttgttttgagtagctgattaggtggctgctgagattgggaagatagtaggggagtgaatggagggggcaaggcttctgttggtgttctgggcatgtgaagtacctgctaggcgtccaggtagagccattaaggcctactgatcatagattgtaggttgtatgatgccaaagtccagaagagaggccactctggagatgtgcatttggggccatcagcaggtaggtcgtttcatgggactgaatgaggtccccgagggagaaaacacagatagagaagagaagactagacccatccgtcagaaacgccagcatttagagttcaggaatagaaggaaaaaccaacagaggacactcatgctgctctctctgtacttcttgctttaatatactttttccctatactcttattttacctgtcctattacagcaaattatgtttaactccaactagaccataagcctttcaacacacagatctctctctgagggcccagacaagtatatccaactgtatgcttaacatcaggacttgaatgtgtaacaggcatttcaaactcgacatagcctaaattgaacttcctatctcctccccccaacccatctttgctgatttcttggtcaaaaactttggagtcttccatgaatcctgtctttgtctcgcacttcatatctagttccagaatctgatcccttgttgcctggtctaagccaccatcatctctcactgagactaacttgttgactctcctacagcctatttcaaatacagcagtcagagtgactgttttaaaataaaggcaaatcatgtccttcttctgctagaaaccctgcaccttcacctatgagtgaagacaaagtcctttctggtagtctccaagatccacaacatctgtccccattcctctctggctctccccactccactccagccccatgtccttactggtcctcagactccctccaggcatgtgcctgcctgtgctgttccctctgccaggaatgcttccttgcagatacacgcatgcatggccagctctcacacctccttcaagtctgctgacctaccacttctcagtgaggtccaccttgttacttcccaacgccctagctcccaccctaacttcctcttcttttcctttttttcaccacacttatcaccttttgccataacagacaaattgtctactatgttttttaacttatattctgtcttttttcccttacattcccagagtgaatggaggcaggggcccacattcactgtggcatgcccattactggggtaggtgtctttattttgttcactagtgtttcagagcctacaacatgcctggcacacatcaggtacttaatatttgatgattgaataaatacatgaatgaataaatggaattttctgtcctccttttactgtctcactcccaagtatatcttcagtttaacctcttcccattctgacatctgcactttatacttcatttctcggcatttccttaacattccagggtaaacccctacctgttttaaaggtgtctcttggggcagtctttggagctcctccaggcagggtgagcagctcttcctctgtacattcacacctctgtcctgactggtccactacccctctgtctctctacaggcggtgaggaccatgacttgcacctcttcatatcctcaaaacctgttatcattataggtgcacagtccatatttgctgactgaatgcaagaataaaacattttatccaaatagtatagcgatttataattcagagaaataaatggcttttccaaaaatagttcttttcatacaaaatgtacattccaaagatggaaacctgtgtttgcttttcatctacgtttatagagaaaagcctcactgcctggtcatgtgccatgcatggcctatgcaccctagacccctacaggcagctaccaaaagtgctgcatagccatttgggagaggtcccttacaaatccagtctgttctagatatctagggccaggccagtgtttattaccactgtggttaggttctctatttgcttctcattcacatgaattactgtgattctgaaattgcaattaatggtaactttttttttctctgtggtattttacggaaatgtatagtcctttgctcttagagaaagaacccattccagtgttgacttcaagaccataagttatttcaaaactatgtaaagattgacaatccagtaataacctgtcactacacatacccagattttccctgtaaactgtaatatttaacatgaaatgttaaattctgatgccagagttcatcaaaaactaaactgttgcctgctttttgcgtctttattcatttttttagatcagaggcttcgaaactgcttactgcattgatagcatgggaaaaacaaatggaggctttgttgaactaggaccctgccacaggatgggagggaatcaggtaaaccaccttacttttgtgtttaagttgttccgtattgagggccatcaggtttattgatcacagagtgatctttgtactttggttttcgatttggtaattttgtttgttttgataaagtaaaacattctgtaaaaaaattgacagtgttaaaacattcacttaaatgatgggaataatagcagtattggttttcacataagcagtcagaatctagaattaatgtctaatataagggattaaaatatattcctgtgggagtatatatttgtcactaccgtaactatgtaagcctagctccctaacaattttttgcaagtattgctcactaatcctcatctttttgcaaatagagtgttactgccagtaatgtatatttcactaatatatattctcttacttatgtgggtatgtttttgctttttcattttttcacattgttggtacttaataaatttgtgttagtgacccatttggtatcttagagactaaagaacttaatgatttcagtgttaataaggatcttcactaacatcaaaataaatataatttgtctgtggacttacagttctaaacaaaattatggaaaaataagttagtcattcaatttaattataggagttaagtttctttcttttcaaatgcacatcagcagggaaggtgcctctgttacttaattctctcttttccttttacagcttttcagaatcaatgaagcaaatcaactcatgcagtatgaccagtgtttgacaaagggagctgatggatcaaaagttatgattacacactgtaatctaaatgaatttaaggaatggcagtacttcaaggtattctgcattttaacttctgaaatattatatgcttttcattttcagtaacatctagcatgtggaatttagataaataaatcttaaaacctgcattcaaattcacttgcattttcctctcatttagtcccttgcataggttttcctgagcactggatgactcattgttctataatgaggcatcacttttgttctctcttacaatattgtcatgtaatgaggccacgatgatgtctataaagagcactgctaattttagtaatacaagaaagtcagtgttctgtgaggcagtcatcaccattgctctcatcaaaatctgatttttgaaatgtaaatgaatcattcattaaagtaaaatatatttaaatatatttatactattaaaaatttggttaatatttgatattgtccagcaggtggagatagagacaaacaaataaaacttgaaatctaggctttcataacgtctttatcattgttgtgtgctaaatacagtgggataaatgtagctagttgcttactttaatggtcaaatttagttattcacgtgacactgctggggtagctttgtgtttcagctgtgagtatttaaagctctgtggcaagttgaggattacaacatattaatagatttatgtatagttttcaaattctagatttggctaacataaatcaatttattattaaacaaaaagtggggaaagctgcctcacactaaaaaaatctgtcaaccctccattttatttactcacccagtatttgttatcatatcccatctgtcatgcaagcaaggacttgtttgctatgtaataatgatatgacctagcttaacattccctgttactgtcatttacagataatttccaggaagtgataagcacgtatcaattgatgattttgtttcttataacaagttaggaaggagaagaatagcataaaccttaaagagtggagcatttattttcacaaaaaaaaaggatatataatagcaataaatagtaggggtcagtgagaacaatattagcaaaatagtaaaagagggctaacacaccagaaactacatcaagaagtaattgaacaaaaaatgacacataacatgttttaggtattttaaagacgcagcactgaatatacatttgtgtgttagatattactgaacattcacttggggaccaataatatgttagactgtaggggagttcaaaaatatagctaaagcacgctattatataatggcagagaagaaagaaatgcaaaaatagagataagcaaaatgccataggacagaaaagagtgattcatgggaggaattactgctgaggagtttcatagaggaagtgtcattgcacaagtcctgaagtgtaaaaaggctttccatggaaagtaaataagaaagcctggatgagcaaagatgtggcatgaaaacatgtagaaaattcaaagaattgtatttcatttggtatccctcaattgtgctttggaggaaagagcaccgaacttcattttttaagttttggagagggatagaccttatttgaggaaggtagtgatggaaaacaatggctacttttaggaaaataattctggaaacgtgaggtatggactgatgaagcaacgagatcagcttgagcagcagttctcaaactttctgtcctctggattccctttacactcttaaaaatttttgagctcccccacccccaaattgcttttgtttatataggttatcactagcaatatttccagaactggaaagtgtctgagaaatttgtaaagtttttatatattaattcatctaaaagtaataataatatacttattaaacattaatgtaaatgacatttttaatgaaaaataactatgtttacccacaaaaaatagtgagaagaatggaattctgtatttttgcaaatctctttaatgtctggtttaatagaagaagacagctggattctcatactcctgcttcatttggtctgatctgaaatgttgttttcgttcaagtatatgagggaaacccagccccacacaagcatacagtttgtaaagggagcgagtactttaatagccgttcatataattgtggctgtttttttattgtacaccacaacttaataattaagtggtagtttcttaaaagttatttccagtgtagactgatatccttgagcattgtacctcattatatggaagtacttgatacgtacttcccacttcatctcatagaattttttttaagtatactgaggggtcaagactgaataaaacgaatgttttgctccttcatcagtgacatccttaagtgaaaccggcatttacttttcaactgtgtgtggccatgagcaatacaactataggtactagcatagtttgattcatgctaaggcaccatcagttttactcaccattgcttttgcactatcggtataaatgttgctaaagtgaaaaggcaatggtgtcttcgtattatgatgaaaatagtttcggccttacagacccaatcctggatagtctgaggaccagactttgagaagctctgagctatattgaagaaacctacagcatatggtgagggccaaaccagggcatctgcagtggcgatgggaaggaatataaaccagagacattgcacatatccatccttagtgactggtatgtgagtgaatgaggaaaagtgcagtatttcctaaggactagagagctgggaatgtcattagccaggataggaacaagagacatagatttggaggggcagataatgaatttaggtttgtatacattgagtgtgagataccagcagtatattgtgacttaacaatgaaagatcttaggacttagaaaactgacaatcaagagaaatccagaaaactgacaatcaagagaaatccaaagtctgaggtgtggttgagaagcttttccatttccttaaactgtctcctcatgaaagtcaagtgatgatttctgatgtcagtgatatcaagggtccaaatttgaaacttttttcttactgtgttttccagaacctgcacagatttactcatattccttcaggaaagtgtttagatcgctcagaggtcctgcatcaagtattcatctccaattgtgactccagtaaaacgactcaaaaatgggaaatgaataacatccatagtgtttagagagaaaaaaataaaccaataacctacctactgacaagtaaatttatacaggactgaaaaccgcctgaaacctgctgcaactattgttattaactctgtatagctccaaacctggaacctcctgatcagtttgaaggacattgataaactgtgattttacaataacattatcatctgcagttactgtttacaagactgcttttaccttaaactttgtagatgtttacatctttttgttgtgttttaagatgatgttggtaatttgtgcctttagctctgttttattagacagagttaaagcatgttgtcttctttgggattacactcaggggtctgaaaggcagtttgatttttatttttaacacacttgaaaaaaggttggagtagccagactttcatatataacttggtgattatcaacctgttgtgtctttatttaattttacatctttttgaagcactgccacaggttattagccaaggtggccttccttcacagtcatgctgcttttttgaaaggtgaatttcaacacatttagtgcctctttcatttctcagtatatatttcaagagcttgtgatgaaatctataggatggtaatgatggacttgtcacctgtatggggaatacttttactactcagaaatgaatttatgtgctgccatttgctataaagttgaactttgtatggcttgaaaaagaaatgacaatatggaacatcccaaggctgtcccatagggttggaagttgtgtagcattcactcccttacctactggcattcccagtgccctctgtccatacctacttctaggattgcaaaggagtcttccaactagagaaaaattgtccactgacatttgggatttacttttctccaatacctgccaatacagaaaactattatcagttgttattgttatcccttgaaagcgagggtgacaaaaacaacaaaacaccgttataaacacatcaaaggttcattctgactgaggtaagactttccaagcccttgttagattaggccttataaaacttgtgtgcattataacctaagctgtgcaacctgtgaagccaagagtgaactgatgtttcatttatattttcatccaaatgacattatctgcacgtttttaaaatttaaaaacaaaggactatttaaaaatacagtttattaacaaacgtgaactactttctgttacattaggtgttccctagtgtttcttaatttctttttagaaagtgtatttttattagtatttttccggtgaacagaagatttgtttggatttaaacatttactaagacagtacctattaggaaaaccaaatattgcaaatggtcaattcgattttaatttctcaaaagatactctgttatccagaagattaaaatgcctacattgagtgcttaaaaaaaaaaaaacaactgtgatgatgtgagcagaatggcaagtaagttaagcatttttgatcctgtaatcatggtatcattacaatgaaaggaattcacaaactactgccagaggaagtttgttttttaatttaagagggaaatataacctataaatttgtttcttccaagcttagctcttaaatttggagactcaaagttaaacatcctcaacagagttttatttataattttgaattgtcaatttgtattttgctactgatctgtgatcaaccattttaactttcatctctagggatgtttaacatttataattgcaaaataaaccaactataaaaaaagaaactaagagagaattggtactttaattacttgtgtgtttgcaaataggctccattttccatgttgagtagattataaccttattaactatgcataggcctaagaaaggtggcaatgaactgtgcatgtaaattttaaatgggtactttgtgcaattcgttaaaagaagatactctatgaatatgattctatatattgaaatcagaaaacctaccaaacaaaaacatcagaagctgctgccataatgactattttctactgtaggctgctttggaaataattcccatatccttgctttgtaagttggtaatatcactatgcatttctacacattttataaatttgatttatgcagattttgatacactgtatgtttctgtagaaattgtataaatattcaaaattttattaggataaatttgagaaacttacgtatatcttaattctgggttgcttgttttttaggtgacaaaaataaaatattgtattttaattcatgggtttttttggtgcttgtaatcatttcaaatctaaacactgcacatttgaaagaattacttgattttactatttacaagacacacaatacctaaaatattatagaccatagttattagttgagtatgtgcttgactgttgcttagcattctgttacacatgcttagaatactcagagcttatgtatctgttggaaggaaacaaaggtttatttttacctgtttgcctatgtataccaattttttaagtttatactttttttaattataaaaaattaccccagcaacatatatccttcttggctgtatatagaattgccttcttggctgtactatagaattgcctattagaagcaaacatgccttcaaatcaaatttgtttacaacctgacagatcaggttaagtggagaaaaatgaagagaagggaagcctaccacaatgaaattagaaatagtccatagcaccttgtacaaaacacatctcaagagaagatacggttgctaacagattcaagtaagtggctgtattgatttgggaaactttctctcaactgacctgtctattgtcatatctcccaattcttagctgctgtagaagtaggctaagaaatttgaaaaagtgacagcaccagactagaataaatgggagtttctttatttcttaagtttctcatagggatcttggaatatatttcatttctggacataattgggaaaaaaatccatatataattcaatggaaaacatgacaagtacctcaccagaaagccagatacctaataggccaatagtttaggtacgtgaaaattattccatgtgaaagcactttaagaagtgttgagcattatgaaactgtgatgtgataagtgcatcttgaagaatatctaagatattgtatccttcaaattacctttaaatgaaatttctcttgggcttttggtttgagcaaataaaccacagctgtattaagaattaactaaccgaaacaaaactaaatatttgaatagaaaatagggatgaatagacttccacttccggctataattttaagtggacttatcttgctaccccaaacaacagttaatgctggacaaaatatatgaagcaactgttttcaggaattggatactagtcaaagcagactgatatctaaaagaaaggaaatacacaaggtgaatcccaggttcaccatgtctgtctccatgggaggacattcccaaccatggtgcaaggaatgcggctcagaatggtggtattgctgaactgaggaggcggagtggaggtttccggctgctgaaacagctagaatctacaatccaggttattggaggggaagtacgcttgagtgtcaggagagctatacaggaatttttataccacagccatttgcaatagcgaaaaccctggaagcaacctaaatgcccattgacaggagaaaggatgaattgtgatataatcacacaatggaatattacagagatgaatatgaataaactagttgttataaacaagttttaggtgtacaggattgaatgaaaaaggcacttcccaaaacactttattcagcactttttatcaatctcaaaagtgactaaaagtaaacatacagtatgttaatacatttatacatgataggttaaataacttgtccaagttcacaaatttagtactggggtcaaggacataatcaagtccagtactcaatatccctctaactctgtgggatgaatatttatttggtgccaggaaaaactctcctaaagaatgtatgttttccacataacttctttaattttcctctctacctagactatcaagaacctcagggctggaacagtggctcacacctgtaatcgcagcactttgggaggccaaggggagaggactgcttgagtccaggagtttaagacctgcctgggcaacatagccatgtgtggtggcacacatctgtggtcccagctgcttgagaggctgaggcagaagaatcgcttgagtctggaaggtgaaggctgcagtgagctagaactttatctaatactccatcgtagtatctgtattaacccatgtatatcggcatatatacttttagctaatatttatcgagcatttactatttcttgccaccaggataagtgtcttaaatgtattactttacttaatcctcaaaaacattcaaattttacagatgaggaaaccgaaatgttacatgagttgtctgatgttacaaaaccagtaagaaaaacagagccctattcaaatccgtgattcactaccttgcttttaatttctttcataaccttgtttttttctttgtatattttgttcttgtttttctttgtataagccattaatattttttggaaaaaatttggagaatcaaagaattacacaaatatgaatggattatggtattttactatctcttatctgcccgaggacaatgtccaagttgattgtcctgcttttctaatgaaagactagatgatataaaggccatttccagttccaaaatttagtgctacataatgctgaaaagttatttttctttccttttaatgcgacagtctattgcactcctgagttactattctatagatgtggtaacacctaggatgaggatcaccagaagtctgcactgttaactcttgaagaataaaggcccaggagcacaatgaagttcaattgaaacatttttatttacctttgctgcagggtaagttgagtttccaatcagggcaagaagggtttctgacctataaaaacaatggttagctgtaaggcatatataaacttttattaaccttggacctgactcaagtaaaaattattacacttatatttactatttaatttatagaagtggcaaactggtgacctttgggcagaatcttacctatagacatgttttgaccccaaaattggaattcattgccaatactgtatttaaaattcagaattcacgagttctagttccacttgaaaatttgagagatctgggaatcctatattcacatttccatctagcaacaggactgagctaaacagtggctatcccctttaacctgggtatttgtatatttacaaacatgcttagaacactgtttcttgcattagagacaaagcagtatacaaaagtgaaaattttactgccctcacagagcttactttcaaaatgttcttcacttcaccacatccagtccttttccctggctagtctctataggtcttggcatttcctaatgtcaataaatactctgcctttctctaaaactgtcagtctccaacaggaatctcatgaagaactaatccaaacatggtgaggtatgaaatttcatttttaaaggactagatcttacacagtggcatagcagctcctttagctttcttgattttattccccaagaaataaaatcattactgctttgtaaagcatttttagtgatatatttagtaataaaaagccaggtttaagataatgctatttttctactatgtaagacaaccttatgatttacagtaagtgaaactggtaaaaggtaaaatacaaaaaaagcatactttcctctattgatcaagtttgcagtgagtgctttgtttgatatataagagaatttaggaaattctaacccagtgccctgcttttatagattaaaagaccaaaagtagtggctgacatcgggaaggaaacgtgagcccctacctcagtccttgcaccaaaattaattccagaaggatcaaagatgtaatcaaaaatttaaaaaaagaaaccaaaggataattatttttatagtcttttatgatctttgagtgggaaggacctcactagaaaagttttagtgaaagaattgctaaatttgcctacataaagaaatctctgcatgaaaaaagcatcataaagtcaaaagggtcattttccttaatatatagtattcccaaaaactattaataaaaagaccagtgagaaaagaccacaggaaagaatacaaatggcttttttttttttttttttttttttgagacagagtcttgctcttgtcacccaggctggagtgtagtggcgtgatctctactcactgcaaacctctgcctcccgggttcaagcgattctcctgcctcagcctcccaagtggctgggattacaggtgcccatcaccacacccggctaatgtttttgtatttttagtagagacagggtttcaccatgttggccaggctggttttgaactcctgacctcaagtgatccgcctgcttcggcctcctaaagtgctgggattacaggcatgagccactgcactcagccccacaaatggctgttaaacataaaaaaaaaatgaaactcataatagaaaacattttatctatatcagaataacaaagactaagaagtttgagaactattatgttgctgagatgaggaaacaggcactccaaaacatttcattgctatggagtgtccactccatagcgtagtacaacttctattgttgagaagcagttttgtttagcaggctccattaacagcaccagagcagtttctggcatatattaagcacaggttttagctagtatagttagcacatttttaaatgtgcatgtcttttggcccacctacttcacttgtaggtcttttttcacatgtgacatcaaatggtttcgtttttttcagaccaagtcttggtctgttgcccaggctggagtgcgatggcatgatcacagctcattatagcctagacatcccaggctcaagtgatccacctcagcctcctaaatagccaggaccacaggcatgcaccaccatgcccggctaatttttgtatttttggtagaaacaaggtctatgttgactagactagtctcaaactcctgggctcaagtgagcctcccacctcacactcccaaagtgctgggattataggcgtgagccaccatacccagcaagtgttctctaactaaaaatagaaaaaattagccaggcttggtggtgggcgcctgtagtcccagatacttgggaggctgtagcaggagaatggcgtgaacccgggaggcggagcttgcagtgagccgagatgtgccactgcactccagcctgggtgacagagcgaaactccgtctgaaaaaaaaaagaaaatatgtatataaaacaaaaacaaaacaaaacccataattatcctattatccttagggaactggttaaattatgatctattcaatgggataccatacagatagctatttaaaggaaaatggcagctctgttgctctggggtactgaaaacaatctccaaaataatgagatgaatacacttgtatataggaagcttctatgtaacactgtaacatatacacacatatatattttttacacctatgtctttcttaaaggatagattattgcattgttggtgttgcctcctgggacagggtagcagaatcaagaaagagtataaactattacatatccttttacattctgaactattaagatatgatctatttttaaaaagaaaacaggtttcacaaacacacttccaagtagtggctggtgtgagatctaattcttgccctcattttagttctttccaatatgttcactccttgaagtcacctggtcttgattattgagaatttggggaattttgatccacacttacaagaatatcaaacatgagccaggaaggatccatctcaaatcctgagttcattctggaggaactcttgattaaaagaatagttcttagcttagaaacttaaaagtatattttatggaaaagataatgaaagaagtcacagactcccaaaaagaaaggtgacaaggaacccaacaggtctgcctcttggatctaatttatttagaaattcttaaataaacaaacttacttactctatttcagttttagaaactcttattcgatatcctttatgcagtagttactactttaaaataacacttcgaccattaaaacactgtgaagtaggtaaagttcatactgctagcatttggtagaggtagggaactgggtctcagacataggtagtatctaaaatagattaccccaaatgttttagcatattaagtcatctaccaccaggaaacactgaaaattagttttcatcttatgataagtgaaagccccaagtctgaatgtaagatttcttatttttatgtaggccaatttatcaattctttcatggctttgggaggtctctcccactcagaatataattaatagagggcaatcataaagatgattgaagattttacttaagtccatttgttctaataccccactatttaacagagaattatcttaccgaatatgagacaaccaaagctcccatggttgggtaacagaaatcctgacttctattttaaagtttggtaggtaaccaagattgtcaaatttaactctaaaattgtcaacaaatagcttacttctataattctataagcacatagccaaccagatggccaaccttcactaataatctctaatgaaagttatcttaattcaaatacagcaactgcttccttaaacaagcatttttaaaataactgccttccccgtaaataatacaattcccaggtaagtttagtcatggaatataaccatctcaaacggcttcttagttacccataattctaaagcttaagaccaaaatgaagatatacagtaatcctcccttaccatggcttcactttcccacagtacagtattttcagaccacattcacaaaacttactagttataaatgttctcattattgctgttaatcttactgtgcctaatttataaattaaactttatcacagttgcgtatgtataggaaaaaacaaggcttcaatactcttggctctttcaggcatccactgtaggtcttacaccccacagataaggagggactactgtaactcaaaacctaatccggtattctatcttgaaacagctcaacttaatagcagaaaacttaatcttgttattgaattttgtttcagtttgtccttttagatatgaattcacattctagcccctcttcttcccattaaagagaatttttcacccaaaataaacttgttaaacaatatactgggacaggcgtggtggctcacacctgttaatcccaacactttgggaggctgaggtgggcagatcatttgaggtcagttccagaccagcctcaccaacatggtgaaaccctgtctctactaaaaatataaattagctgggcttggtggcacatggctgtagccccagctaccagggaggctgaggcagaagaatcgcttgaacccgggaggcggaggttgcagtgagctgggatcgtgccactgcactccagcctgggcaacagagtgagactccatatacatatatatgtatatatacgtatatatgtgtatatatatacatatatatatatatatatatagtatatatatatacacacacctgaggaacaatttagctaataaacagaaacgtcaagtacaaaacttaacgttctgtaaaactgcataaattcttataaagttcactgagttcaacatgtaacttttaaagaacattttgcaaatatgagcatgtttggttttaattctcaaacattttactaggtcaactgtgtctaagaactactaggcagaaataccgaaaaaaatcaacatagctctggtcttcaaatggcttttttaaagtgaaaattaacttagcatattaagacaaagacaatagaaataatatacataattttattacaaaattttttttaaaaaaacgaaatgcaacatcctaaaaaacccaaaatttactattgatactaattcctacaagtttgctgtgctaccatacacaagaaattaaaaaaaccattaaatatttaggaacattcaacatcagaagctgtaaaatctaactgtatgagtagcccatcaaaaagctacaacctgcattttttaaaagtattttctctacagagaatcttatcagctatacaaaaatctgtacagtttttatactgaagctagtattgagctgcacttgaattcacattcttagcaaaataattgcctgagcacacacacacattccacacgcatcattaaaggatagccatttattcttcatcttcatcctcttcctcctcatcttcatcttcttcttcctcctcctcctcctcatcttctggttcgttcttcttctttgagcctgttggcctgccagggcccttctttcctgcttcacttttgcccttggcacgatatgcagcaatatcctgaaatattgtcaaaaaaataaagcatccggtatcattactcaactgtgaaaaaccacttagttgtaaacaatctaagatgattgaccaataaccctaataactgtctaaaaaggtaaccagtctaagtttttagagcacttatcccactaggctttaacaagttaatgacgtaaaatgacaagggttgcgatacagcagtatcagtactttcactaccaatacccttttacatcacacacagtgccatagtccctcctgtaccttcacattttatatatatctacataaaacaatttctttgactctctgcttaaaaaaaaaaataacagactatacagactatacaataactacaagtaactacaagtctgtctgcaggaatatactagtgctacaaacactggtttcagtcaaaaggaaggtttcaattaccttgtgttgaagtgtacaattttcattaggccttttcaaaacatagctgacaaccattaatacaagattaactaaatttcccaggttttctacagttattacctatacctagtcttatccacggctttaaaaaagatgacactgtaccttttcatatttctcctttagcttagctgctttctgttcatatggttgtttatctttggctgactgctcagaccacatttcacccaatttctttgcagtatccccaatggataggccagggtgttcacttttgatctttgggcgatgttcagagcaaaacaggaagaaggcagatctgaaaggaagcaacagagtttaataaactgaaggaaaaatccaaggagcaatttgggttattttaaacttacggtggccttttaggagcattggggtcctttttcttccccttcttatcacctttgggaggaacgtaatttttcatctccctgtcatagcgagctttgtcactttttgccatatcttcaaacttcgacttctcctttgcagacatggtctgtggacataaaataagagccaaaaatacagcaaaattgttacctataaacatccaaagacgacaagatcatctttaaggaccacattttccttaacagcattttgctttcgaagtcttatataagtaaaaacctaaaatcgtctgcctggaactcttaagatattcaggtgagtcactggggtggcaaagttgaagctcatgagttgcctactacctgcctaaggccctcctagccgaaaaccacacctgcaccccctgagctccgtccctctcctgcctcaccttccatctctccgaacacttcttggagaattccgcgaaattgacggaagagtccgggtgtttcttcttgtgctcttcccggcaggtctgcacgaagaaggcgtacgaggacattttgccccgcggcttgttggggtctcctttacccatgttgacagatccgcgtccacctgacggggccgaggggggagaggggaagccggagggtcggcgcggagcccgcagctgccagggcgggcgctggcggggctccgcttcccgcccaaatccgctcccgccctgcccgcgcccccctcctcccgagggcgtcctcccaagggcggccgcccgcgcccccgcccgcgccccggcgcacaccctcctcctcctcctcctcccggcccgagcggccgcggctcagcccagcaagtggctcccggggcccgagacgccgccgcccgcccttcaccgagtccggtgactccgc

SEQ ID NO: 1048 - DNA, 4309 bp, Homo sapiens
aggagagccggaggagggggaaggagggaggggagagcggtggcggcggctgcgccgggctgtgagtctctcgccgccggaggaagatgaggctgaagattgggttcatcttacgcagtttgctggtggtgggaagcttcctggggctagtggtcctctggtcttccctgaccccgcggccggacgacccaagcccgctgagcaggatgagggaagacagagatgtcaatgaccccatgcccaaccgaggcggcaatggactagctcctggggaggacagattcaaacctgtggtaccatggcctcatgttgaaggagtagaagtggacttagagtctattagaagaataaacaaggccaaaaatgaacaagagcaccatgctggaggagattcccagaaagatatcatgcagaggcagtatctcacatttaagcctcagacattcacctaccatgatcctgtgcttcgcccagggatcctcggtaactttgaacccaaagaacctgagcctcctggagtggttggtggccctggagagaaagccaagccattggttttgggaccagaattcaaacaagcaattcaagccagcattaaagagtttggatttaacatggtggcaagtgacatgatctcactggaccgcagcgtcaatgacttacgccaagaagaatgcaagtattggcattatgatgaaaacttgctcacttcgagcgttgtcattgtcttccataatgaaggatggtcaaccctcatgagaacagtccacagtgtaattaaaaggactccaaggaaatatttagcagaaattgtgttaattgacgatttcagtaataaagaacacttaaaagaaaaactggatgaatatattaagctgtggaatggcctagtgaaggtatttcgaaatgaaagaagggaaggtttaattcaagcacgaagtattggtgctcagaaggctaaacttggacaggttttgatataccttgatgcccactgtgaggtggcagttaactggtatgcaccacttgtagctcccatatctaaggacagaaccatttgcactgtgccgcttatagatgtcataaatggcaacacatatgaaattataccccaagggggtggtgatgaagatgggtatgcccgaggagcatgggattggagtatgctctggaaacgggtgcctctgacccctcaagagaagagactgagaaagacaaaaactgaaccgtatcggtccccagccatggctgggggattatttgccattgaacgagagttcttctttgaattgggtctctatgatccaggtctccagatttggggtggtgaaaactttgagatctcatacaagatatggcagtgtggtggcaaattattatttgttccttgttctcgtgttggacatatctaccgtcttgagggctggcaaggaaatcctccgcccatttatgttgggtcttctccaactctgaagaattatgttagagttgtggaggtttggtgggatgaatataaagactacttctatgctagtcgtcctgaatcgcaggcattaccatatggggatatatcggagctgaaaaaatttcgagaagatcacaactgcaaaagttttaagtggttcatggaagaaatagcttatgatatcacctcacactaccctttgccacccaaaaatgttgactggggagaaatcagaggcttcgaaactgcttactgcattgatagcatgggaaaaacaaatggaggctttgttgaactaggaccctgccacaggatgggagggaatcagcttttcagaatcaatgaagcaaatcaactcatgcagtatgaccagtgtttgacaaagggagctgatggatcaaaagttatgattacacactgtaatctaaatgaatttaaggaatggcagtacttcaagaacctgcacagatttactcatattccttcaggaaagtgtttagatcgctcagaggtcctgcatcaagtattcatctccaattgtgactccagtaaaacgactcaaaaatgggaaatgaataacatccatagtgtttagagagaaaaaaataaaccaataacctacctactgacaagtaaatttatacaggactgaaaaccgcctgaaacctgctgcaactattgttattaactctgtatagctccaaacctggaacctcctgatcagtttgaaggacattgataaactgtgattttacaataacattatcatctgcagttactgtttacaagactgcttttaccttaaactttgtagatgtttacatctttttgttgtgttttaagatgatgttggtaatttgtgcctttagctctgttttattagacagagttaaagcatgttgtcttctttgggattacactcaggggtctgaaaggcagtttgatttttatttttaacacacttgaaaaaaggttggagtagccagactttcatatataacttggtgattatcaacctgttgtgtctttatttaattttacatctttttgaagcactgccacaggttattagccaaggtggccttccttcacagtcatgctgcttttttgaaaggtgaatttcaacacatttagtgcctctttcatttctcagtatatatttcaagagcttgtgatgaaatctataggatggtaatgatggacttgtcacctgtatggggaatacttttactactcagaaatgaatttatgtgctgccatttgctataaagttgaactttgtatggcttgaaaaagaaatgacaatatggaacatcccaaggctgtcccatagggttggaagttgtgtagcattcactcccttacctactggcattcccagtgccctctgtccatacctacttctaggattgcaaaggagtcttccaactagagaaaaattgtccactgacatttgggatttacttttctccaatacctgccaatacagaaaactattatcagttgttattgttatcccttgaaagcgagggtgacaaaaacaacaaaacaccgttataaacacatcaaaggttcattctgactgaggtaagactttccaagcccttgttagattaggccttataaaacttgtgtgcattataacctaagctgtgcaacctgtgaagccaagagtgaactgatgtttcatttatattttcatccaaatgacattatctgcacgtttttaaaatttaaaaacaaaggactatttaaaaatacagtttattaacaaacgtgaactactttctgttacattaggtgttccctagtgtttcttaatttctttttagaaagtgtatttttattagtatttttccggtgaacagaagatttgtttggatttaaacatttactaagacagtacctattaggaaaaccaaatattgcaaatggtcaattcgattttaatttctcaaaagatactctgttatccagaagattaaaatgcctacattgagtgcttaaaaaaaaaaaaacaactgtgatgatgtgagcagaatggcaagtaagttaagcatttttgatcctgtaatcatggtatcattacaatgaaaggaattcacaaactactgccagaggaagtttgttttttaatttaagagggaaatataacctataaatttgtttcttccaagcttagctcttaaatttggagactcaaagttaaacatcctcaacagagttttatttataattttgaattgtcaatttgtattttgctactgatctgtgatcaaccattttaactttcatctctagggatgtttaacatttataattgcaaaataaaccaactataaaaaaagaaactaagagagaattggtactttaattacttgtgtgtttgcaaataggctccattttccatgttgagtagattataaccttattaactatgcataggcctaagaaaggtggcaatgaactgtgcatgtaaattttaaatgggtactttgtgcaattcgttaaaagaagatactctatgaatatgattctatatattgaaatcagaaaacctaccaaacaaaaacatcagaagctgctgccataatgactattttctactgtaggctgctttggaaataattcccatatccttgctttgtaagttggtaatatcactatgcatttctacacattttataaatttgatttatgcagattttgatacactgtatgtttctgtagaaattgtataaatattcaaaattttattaggataaatttgagaaacttacgtatatcttaattctgggttgcttgttttttaggtgacaaaaataaaatattgtattttaattc

SEQ ID NO: 1049 - protein, 653 aa, Homo sapiens
MRLKIGFILRSLLVVGSFLGLVVLWSSLTPRPDDPSPLSRMREDRDVNDPMPNRGGNGLAPGEDRFKPVVPWPHVEGVEVDLESIRRINKAKNEQEHHAGGDSQKDIMQRQYLTFKPQTFTYHDPVLRPGILGNFEPKEPEPPGVVGGPGEKAKPLVLGPEFKQAIQASIKEFGFNMVASDMISLDRSVNDLRQEECKYWHYDENLLTSSVVIVFHNEGWSTLMRTVHSVIKRTPRKYLAEIVLIDDFSNKEHLKEKLDEYIKLWNGLVKVFRNERREGLIQARSIGAQKAKLGQVLIYLDAHCEVAVNWYAPLVAPISKDRTICTVPLIDVINGNTYEIIPQGGGDEDGYRAWDWSMLWKRVPLTPQEKRLRKTKTEPYRSPAMAGGLFAIEREFFFELGDPGLQIWGGENFEISYKIWQCGGKLLFVPCSRVGHIYRLEGWQGNPPPIYVGSSPTLKNYVRVVEVWWDEYKDYFYASRPESQALPYGDISELKKFREDHNCKSFKWFMEEIAYDITSHYPLPPKNVDWGEIRGFETAYCIDSMGKTNGGFVELGPCHRMGGNQLFRINEANQLMQYDQCLTKGADGSKVMITHCNLNEFKEWQYFKNLHRFTHIPSGKCLDRSEVLHQVFISNCDSSKTTQKWEMNNIHSV

SEQ ID NO: 1050 - DNA, 22021 bp, Mus musculus
  misc_feature (1)...(22021): n = A,T,C or G
gcaccataaacagaacccccacaagccaggacccccctccatcctctggacatttatttattcaatagaaaaaaaatacacttaaatttttcttgagccaaacccacttttcccccttttggtcattccattgctacagccatataccttgaaaaaggtaccaaagcacagttataaaattcaaacatttatgctgaacaaagatgctgaaaataaccttcctcagaaattattctcaatagtcattttgattgattcaactgaatttcaacagagaacaatagccagtgtttctaatgatagcgattagtcattcaaaaaaatgttaatgccccaagtaacctttgtaagaagagaagcagttgtttgatacgctttagaaaatttattttaaaattatccagatttgaaagggtattatgtttaccagcaaagcattaaaatctctctggaaaacttggtttcaggtagttgtgatgtcataaggttagaataattgggataatttgtctaatctaggtgggcagcttttatcattatcagttggttctgaaattattatattggcatcttgtaaattgagaatttattgatacataaatctgattgattaattataagcttcaagagttttgatttactgggttactgaaatgtgggactgccaactacaggggtttatggccaagagagaattagtggttccagagataagtgaaccagagctgggagcaaagcggtcagatcagccagatctattgggtaagctagagagagttggtggggttcaaaagtgcaggaagcctgccagtccagccccactggagaattttttttttaaaaaatatttcctgtaacaaactcaggtcctttggaagaatggtgcatattgagtgttcagccaccatcccagctcccttttactgagggaagaagacacttttaaacaattctttataggaatgttactaagtggtattagtaagtcaaatgtggttggaaaccccaatctctggagtcttctgcagggaacatgtatttatcagagaggtgcctgactgtggtgaggcaagcagggctgcaaagatatgaagaccataggacgtatgtaggggaattcagaacatttggaggcattgttgtgaagttttgctagacattttacaatgaaattctccagtcatagcaatgacaaaactagacacacagaaaacaacagttttagtatactgggcgagagacagctgtcttgaaaaagaaaaaaacaaacaaaaaaaaaaacaagtgtgggggaaaactcaccgttcatggtttccacaggaaaaggtgcttcaggaagaggcatagagtcgtgaacagtttcggtaagacaagggagcagagatctatacccaggaagtggcactaggtggaaaaatagaaggaaactatctagacagagctctgcacgcattgttcaggggctcccctatataaatgcaacttttgcaaggccagacaattggtaaattgagagcagtaataccagtagttctcagaattcacatggggcaaaaatccagccagagtacagatgggtttttgtttgtttgtttgtttgtttgtttctttttggttttgtttttgttttgtagaccaggctggccttgaactcacagagatccacctacctctgtctgctaagtgttgggcttaaaggcgtgcacacaatcctgagtgcaggattcttgatggccacttgggactttacatagagactgaagagggcatgctttgtagagaagcgaacctcactagaggaaagcaaaccccagcatcactaacctagcacctggttgtttctaagaggaagtgcaactgtccttagaagagcaaaccagaaaatccccaaattaatgtcaaacattacagacaagacagtgccattcattaccagaaagcacaatagtcaatacaaacacatttagagagattgaaagggacttttaataaaaggctttaaaaatatgctaaggagctgaaaacaaatattatgactagaaaacattagaatgaagaacctataactttacattttttcaaacattatttttaatgatgattcttcgatgctttaacttcctttgtagcccactacccacaagaggtagtgggaaagaaaggattcaggagaaggggacctgttagaaaggttcacaggttagcagcagcagcagctcactttatttgcaaacactttaccaatatagcagcagtctagttaggtagagtcaggatagcaaataggaatcagcagcagtggcaccacccagcagagaaagccaggcctcagcctctgcacaactcagcaggagggaccgagaggaatgccagtagaagttctccgctgtgcctctctcagcaaaacgaagatcagaagatgtgagaccaacaagtgttgcacaggtagctctataagcaagccaagctcagcctctgtcactgtgtgtctagttctatttacaccctctaaacatcatgtgacatccatgggtcttgcctcggctcacatcttgcctcaacacatgctcttatctcagttgagatcactctgtcaaacagtgggtacctagggaagtggcaggaactttcgagagatagcatttgaaatgtaaataaagaaaatagccaataaaagaaagaaagaaagaaagagagagagagagagagagagagagagagagagagagagagagaaagaaagaaagaaagaaagaaagaaagaaagaaagaaagaaagaaagaaagaaagaagaaaaaagaaactgcagcacaccaccagaagtttttttggtgcatttctctctatggagtcccagcaaatggagctcaactacgcaatgtaaagtggtctaatgcatgcatgtcattagcgaagaatccttcatcatgtgtcatttcacttgtttgctttagcagaacattctctctcctttgtctgcttcagccaaacgttctttcataagtcggccttagtctttcacctgtgtccacttcaggaaaacactctttcacatgtttgccccatcaaaacaccattcaacacaactgactttccaacgaacccttaagtttccacttcaagagcccactgtcaagtctagaaagtaaaacacaatattttaaatggaaaatcccatgaatgtgattctcagcagactggacactgcaaaagaacgggatgaggatctcaaagacagcagtgaaaccacctgaagagtacattgaaagggcaggtacacagcatagcaaggagcagagcctcgggtggaaaggagtttggataagagttcaggggagacaaaatgaatgtggaaactacaagggactatttgcagaggatagaaagcattggacgaaaacatatttttgttcatgatgcaagttaagtaaatgcaaacatttgccaaaattaattagtctgttgattaaatgggcaaaggttactaatgcgttcagcttgtactcagtaacactgataaaattgttttagacaaagtcaattctccactgagaactgaatttactttaactgctggagaggggggttaggtaagccgtggcatgatggaggacctggctagaaggcctcatagtgtgagtagaaatgtcttgcagatgtaactcataatccaatataaataatatatatgaattcagattttaaaaaatattactttctattacttttcactatttctttttcagaagtaagacatttattgtgacctgtttcgatatgattacctagaaatagaaaaaagaaaatttcttcataaaatatcactacttcatatgcatattcagctagaaatatttatatatacatattatacatcacactatataaaatataaatatatgtaattgttatacaaaaaaattataatatacatttatacatcatataattctatatatttgtacataaatatgttttatatttacatacatttatgcatatatcatataacatacattaattaatttcattatatattatatatcatacatatatcatatcatatattatatatcatatatcctgtatcatgtactttatgttacattatatatttatatattatttgtatataaataatatctagaaatatgtgttactatatttataatattaatattagataatattaatatataaatatattatatatatttacatttatgttacataaaccatctatgtaagatgggagatggatgttatagtctagaatttgattgctcctatacatgctggctgtgcatctagtcccaaattcttcaaaagctaattgactagcaacaacacaataaaaacataactaaaatgtcaaagtttctggtacgtgtataggaccacacatccagagaggaaatcctgagcaaaccatatttccttgtattttggtattttgagtcatgttatcgttgattattttccctggttccttgagttattttagcttaagtggtcatttctgtatgtgttagcaatgctttaggttgtagataatagaaaccctatctatatgttgtatacatcagaagaataagctttcttattaacaagtctggaagtactggccccgagttgtcttagtcagggtctattgctgtgattgaaacattgtagtcaaaagcaacttgtggtggcaagggtttattttgcttatacttccgggtagcagacaatcactgaggtaatcagggatgggactgaagctgagaaggaaaccagaaacagaagaatatagtatgtattatatattatatgttacatgttacatattatgcatatacatgtagaggccacggaggaggagtacttactgtcttgcttctcatggcttgttcagtctactttcttatagcatccaggaccactaacccagaactgtccccatccagagtaggctgggccctccctcatcaataactaattatgataatggctacaggccagcctacaactgatcttatggaggcatgttaaaaattgaggtttcctgccgggtgtggtggcgcatgcctttgatcaggaggcagaggcaggcggatttctgagttcgaggccagcctggtctacaaagtgagttccaggacagccagggctacacannnnnnnnnnnnnnnnnnnncccccacaaaaaaaaaaaaaaaaggaaaaaaaaggtttcctcctatgctatgactctagtttgtataaagttgagaaaaagctagccatcacacaggctagctgcaaatgttcacagttaggaactctccccgttctccgacttctgttctgcctcatgcatgctagcctgttatgcctaagctggttgccttaagtgacaaaatgtgcttctgtggccctagcatcccatcatttggaggagaaggtcctgatttgaaaagaaatcaaaattttgtattcacccttgtccaccaaaaatgattttttcatagaaattattcacaggccaaacagacagatgtttctacccttttttaatcttattaaaaatactttctcctcacagaatattttttaattatggtttcccttccctctgctcttcccagctcctccacacattccctctgatatggatctactctctgacactcactagaaaaaaaaacaggcttctaaggaataataataataaaacaaaacataagaaataaaatattataaggtaaaacaaaaactaacatcagaattcgacaaaataaacaaacagaaggaaaatagctcaggagaaaggaaaagaatcaaagatccactaggtcgcacactcaggaatccaataaaaatagtaaactagaagcatatgtatatgtatgtatacacacacacacacacacacacacagaagacgtgttgtagccccatgcaggctctgtgtgtgctgtgtcatctctgtgagctcatacaagctttgctcatgttgatttagagagtcttattttgtgtgcatatgtgtcctccaagggctctggcttttcagctctttctgtctcctcttccatagggtttcctcagccccaaggcggtggacttgatgaaaacactccatttagggctgagtgtaagcttgtcattctctgtataatatctgtgggtctctgttcctatctgctgcaggaaaaagattcactgatgacatctgagtagggcatggatctatgagtacagcagaattctaataggggtcattttattgctacagctttttcaattttttttttcttttttggatcagtagtatttggttttaccatagttccctgggatatttagtctcagggttttggtcaccaaagcagtgtcatgtatgggttccatctcaaggagtgggtcttaaatcaaatcaatattggtgccttattcccacaaactttgtgccacattgtctggcggccaggaaaccattgtagatccaaggatctgtggctgacttggtgtttacgtttctctttcggtagcctgcagagtactaaagacagtagaacctaggggtgaaggctctttgtagtcaccaggttaacatctctatgttcagtgagttgtataggtgctgtcttcagtgatggagccttgccatcagtttgtggagaacaacctatatcttgggttatttggagatttctgtgggaaccttttggctaacaactcaatttgatttttcgtagaaattattctcaagcaaagcagacgtgtttttgtgtttctttacagaacaggaacatgagatgatccctgtgaggagtaaaaaggggatttgtgtgttagccagttacgattatcctttgctgctgggagtttggcctagttttctacatatgttgttaattcctctcctaacctcctcaacctagacctcaaaatatcctttacaaactatagcaaaattaggataggaagtaacaattatgtctacaacgattattaaagtgagaatacagaaagataggtaaggcccatctctactgtccccatgccgcacaaatggagtcttggtgctttataatggaaacttcccagaccacatactttgccttctgtgctgatggaattcaatggaaaaggagctgccattcgtatcctttatgagatatttttaaagaacattcagctctttggacaaggtgcaacacttcaggcacctgacctctcaccattacttaccttacattgtgccttagaaacttgctgctgtttcttatatgtctcctagtagaatttgcaaagatcagtttttccttcttgtcctccccttcacaactatttgtattattgatagtgctagggttatatccatgggatatatacatcacaacaaatacttttgcatatggtaaagaaaaattataatgataccttcaaagataaagtaagaaatgtgttgttccattttaatagaggagtcaaatggcaggttggtcatttattatctgtaaatactttatttggagtctttgtgtgtacactattccatgctctgtgtgtgtgtgtgtgtgtgtgttttggggtgggggagtgttttcgtcagtgtttctatttctgcacaaacatcatgaccaagaagtaagttggggaggaaagggtttattcagcttacacttccatactgctgttcatcaccaaggaagtcaggactggaactcaagcaagtcagaaatcaggagctgatgcagaagccatggaaggatgttctttactggcttgcctcccctggtttgctcagcctgctctcttatagaaccaagactaccagcccagagatggcaccacccacaaggggacctccccacttgttcactaattgagaaaatgccttacagctggatcttatggaggcatttccacaactgaagctcctttctctgtgataactccagcctgtgtcaagttgacacaaaattaaccagtacagggaggttattgcatccccaaacaagattgtcagtttctgtaagtctagagttacaaccaattgtgagtcaccacatgtggatactggggatggaactagggtcttttagaaaaatggggagcactcacatctgctgggccatctttctacatgcttctcttttgaattatgtgtaagtgtttgtgcctgaatgtggttttctgcacatgagggcaataccaaaagaggccagcattccccacagctagagttacaggagattgtatactacttaatgtgtatggactgaattctggacctctggaagagcagtatgcaagccagccactgactgtttcttcagctgtttacctcccaggttaatcttaattgtttagcaaaatgttcaggttttttcaattcccaatgcagtatactggatgtacattgctgtttatcaaccctcttatcctgtccctgacattcatgtatgcattatgcccaccaaagacactcaaatttgttgattccctactttgtgttgatagatcaaagtcagtaaataaacacttttttctatttgtagaaaacttttgattggcttccagataacctctaaagtgaatcgcatactcttttccaaaacaaacatatttttggcatgctgacctaaaagctcctggttgatcttgttgctctgatagatccttctaaattggggaaataaaatgatttctcatcgatttgttttatttattaaactaaatgatatttatggtcatattgggtaattttccattattaagtgatgatgcgtccttcatacttcaacgatcattgattatacactttaaaatacattttaaaatattaaaccacttaaaaataattaataactcatatatgtatatgtatttccaaatgtcttaaaatatcagattaatttataaaacttttacaaataatgtaggaagtgttattctctatgtactactaaaaaacccatacattctcacagaatgacaggagaaacattcattgtcttgggtattaaattcccaagaccaatttctttgcttaacataactgacctttacaaatgtcaaaaacttaataccttagaaaatgttgtgccacaatttaaatgagtgaaagagtttgggaatttgaaagacatgctaagtagttcttatttctctcatttcctccccgtgggagctctgcctcacagttcagttttatgctaatgtgcttttaccaggtatgtgaattggatttcttcagccaaaataaggggcgagcttccaggagcgttccttaactgctgtcttgacagctccccgcggattgttactagaagctgagattattccccccctagtgtttatattctttaagtcctgaggtcttttaatttttctactttcatttacgtaaagaacttgtccaacttcaacagtccttcatcaaatcttagaatcttttctgtcatactcattttatttgtattaatacatgccctttaaaattgagacaccagggccggagagacggtttggctgctcttccaggggacctggattccagctccaatagtcaaactgcagctcacaaccatctataaatttagctcaaggggattgaaggcctcccacacaagtggtgaataaacatacaagaaaaaaaaaaccatatatgtacaaaaaataaaatggaagaatttttaaaacttgaagtgttagtaggtaaaagggcacaatagtacctaaaatatttttcctaaggcatgatatatggttaggagaacatctaccccagtttgaacttctgcctcaaggagatgtaaagcaacatttaattatttttaataatgttgagcctgaaagtgaaaaagtaaacatcaaaattcctgaggctgggggctgggacattgggacactgcaaaacaaagcggttgtgtgtgcgcacgcgcgcgcggcttaagaccaggggcgcatgcgcagactttcctcaacggtcgcctggcaggttaaaggtcactgaggaagctgagcttcttgctcttcgtacggcagccgagctgcctgcagccatggccttggccagagatgccaagctggagtcggacacctttcaggtgcttcaggacgtggccaatcgcctgcgaatccactcaatcagggccacgtgtgcctgcagctccggacatcccacgtcgtgctgtagtgtggcagagatcatggctgtgctcttcttccataccatgaggtacaaacaggcagacccagaacacccggacaatgaccgctttgtcctctccaagggccacgccgcgcccatcctctatgcggtttgggtggaggtgggccgtatctgtgaatcggacttgctgaacttgcgaaaaattcactgcgacctggagggtcatcccaccccacgactgtcgtttgttgatgtggcaacagggtcccttgggcaaggactgggtgctgcctgtggaatggcttacaccggcaaatactttgacaaggccagctaccgcgtgttctgcctcatgggggatggtgagtcctcggaaggttctgtctgggaggccttggcctttgcttcccactacaacttggacaatctcgtggcaatctttgacgtgaaccgcttgggacaaagcggcacagcacccctagagcactgtacagccgtttatgagaagcgctgccaagcgtttgggtggaatacttatgtggtggatggtcatgatgttgaagcactctgccaggccttttggaaagcagctcaagtcaagaataagcctactgccctgattgccaagaccttcaagggtagaggtattccaaatgtcgaggatgcggaaaattggcatggaaagcctataccaaaagacagagctgatgggattgtcaaattaattgagaatcggatacagacaaaccgaaatctcacaccgaaaccccccattgaagactcgcccaggatcagcatgtccaatacaaaaatgacctctctgcctgtctacaaactgggagacatgatagctactcgtgaagcatacggcttggctctggctaaattgggccaatctaaccaaagagttatcgttctagatggcgacacaaaaaactctaccttttcagaagtattcaagaaagagcaccctgagcgtttcatagagtgctttatcgctgagcaaaacatggtaagtgtggccctggggtgtgccacacgaggacgaactattgctttcgttagtacctttgctgccttcctgacccgagcctttgatcagatccgaatgggagccatctctcaaaccaacatcaacttcgttggttcccactgcggggtgtctgttggagaagacggaccttcccagatggccctggaggacctagccatgttcagaagcatccccaactgcactgttttctatccaagtgatgctgtctcgacagaacacgctgtttatctggcagccaacacgaagggaatgtgcttcattcgtaccactcggccaaaaacagcagttatttatacagctgaagaaaactttgtgattggacaggccaaggtgatccgccagagtgcagtcgacaaggtgacagttattggagcaggggttactctgcatgaagccttagtagctgctgaggagctttctcaacaagggatttttattcgtgtcattgacctgttcactatcaaacctctggatgctgtcaccattatccaaagtgccaaagccacaggtggccagatcatcactgtggaagatcactaccgagaaggtggcattggtgaagctgtgtgtgcagccatctctagagagcctgacatagtcgttcgtcaacttgcagtaacagaagtacctcgaagcgggaaacctagcgagctactggatatgtttggaatcagtgccagacacattatagcagctgtgaaagataccgtaatgaaatgaaattgcccaggcttcatacatcaaggttgttggctttggtcttaaactctgatatctttgtgctacatttatgcttgttgttataaaaaaatcttttatataattctggttttcaagtatcactatgtaacacttttatttccactaataagaaaaaaacgaaaaccctaagctaattttctgttaagttaacaaatgtcattctttttttttttttttttgttacggtgagttatatgtttcttaagcttcaaaatagtcaaaagcacttgattgcaaagttttatgataggatgctaaataatcaacaggagtggggacaatgtacgtcgttgtcaaagttacttataaaagagctttctcaaagataaagatcaactttagcaagagtcgatagttggttttttgtttgtttgtttgtttggttggttggttggttggttggttttttgcttgctttttgttttttgggacgttaagggaatgtgaattaaattgtagatttccttagcgggggttctgaagccagtttgagcacttgcatggcgacattgccatgctagccttttttgaccagttactgtaggatttcctccacagttctacttcatgtcccttcagcagggacatcacttttgagcagcacttttctataacgaaatgaagatgtggctagttctagtttgtacattacatattaatagagtggtttgtggaaagggagagagttgttttccttatgctaaccaaactatgttgttaacttgattatattcatttacagtgaataatagatgtgataaaaaaaagtctttaaaggagcagtttattgtctgttgtatgtaactgctttctccctaataggcaagatagacaaagggtcgaggctggagataagtgtaggaaatactaattgagaagaatccttaattttttcttcataatatctttgaagtgtaagataaatttccagcaggaaaattcaaacaaacaaaccgaccgtgagttcagagctaagctgtcgtaacattttaaaggtgtactgtgtgttagagacctcactactgttttcctcattaattatctgcatttctatctctgcaggcctgagcagttggttttccagcagggtggagatatgacaggataaaacaccaacctgagagttggaaacacggagtcctggtgtttctgcactgccccacactctaatctctactttcaagataaccactcctctttgcatgacattcttaaataatttagaaaaaaatagttgatataagaacgttgtaaatattagaatgggtagatatggagaacatttgtcacctcgatttcttgcctgcagtgatctgtagctatgggcctgctaatagtcccacctgaacctagtaacatcagatgtcacatttccccatgagtggggtgctattgcaggattaagtctcttccttatgctttcttgcttcatggggatacatggttgatttacaaactgtgaactagacaaaaatatcaaaacaaaagttcattggtttcttcagcttttattatttggaaatgtgggaggtctattttcccaaatatgcaaaaacatgtgtttaatagtggcagtacatctgaaaatttaaatgtctaatggaatcttggagactgctagataatgctttataaaatgagattgggggtgagatttaccatatgctcagcatttcttaagtgagagagagtgtgtgtcttgttcagttttgctacacaatgagtgctctgaagaattgagtccgtcctgactagtgtaaccactcactgttaaaattgaagacactaaggcttttcacttctgtttttgttgctgttgttgttattgttcataaaatgatcaaaacattttctctgtttttcatgaaatccactttaacaacttttaatggattaaattattcttcagacagatcttgctgtggtagcttgggatggcctcaaacttgcgttcatccactggcttctatctccccagtaccgacatgaaaggagtatgtatcatgccctgttgaagatacagttttgttaagcaacaaaacatggcagtgatttagtgttgatattctgttcaaggttgtgcctagaagctcttttcgatatcaggagagcttagtgatagttcagggatggctgtcccctcacaattgccttgcttgtgattgcagtagaaaggccagtgtgaaaatgacactcattccagtcaacgtatgacttcttgagttgtgtgggtagtaaaagaataagggtgaatgttttagtttgccttaagtacattgaaaaggttatttaaataaaagttcaattgaggcatctatttgggaaaaagagccttttcaagatagggcaaaagacatggcatttatgtcaagataccagtgctggtcctggttcctagggcctgtagtcctggctaacttggaaagcatatataaaacacttaaaaaataaacttacatgccataagtttcgatgaaaaagacaagcacatatgtattttaaaggaaattgcgccaatacctaatactatgtccttatttcatatgattagaatagagcagaacttttgaagtatgtattttattatcctcacctttacatgggataatgagatttacccttagaaaatggaacttgtctatttgcttcaaaacttatttcaagattctctttgttcacttatattcgacatttccatgttttcctatttaaagtgggtaaatttaaactcattactgttcagcacaagttttaaaaatctagtgtaaatacccaggaaagaaaaattgtagcaatacattaacagtgtggcctcattaacaaagtggccagactctgaaagaataaaagcacatgggaactgtcagaaaagcacacaggccaaataaatatatgtgcacacacaccatcagttcattgggttgatgtttaatcctagatgcaattgtgttgagagctggggactttaggtgatgtgtccagatgctgagatttgtgtcttaaagtcaccacaggcctgtatgctaaagatgagttgacagtcaatagcgtaataagcatttagaagcctcttttcataaaaagcaccaactcttcacttggacccacaaggtaaatatgtgaaggtagaaagtctgtcaggtcttccttcatttggtctctgtcttcttggctgagattccatcttgagtctgcctaatatcatctgttctcaaggctaaagggacagagataagtcattatccttagtctttctccacagtcccggggtaatagacgcatacaagcagctccctttggaatgaattcatgtctaccttattgtgacagtgattcaaccacagctatagacatgtagtttcccttactcatgtgccaccaatagactgttatatttctggtcactttttatggtacatacttcttccaagcagcttctggacataagcaaatctcccttcaatatgttgtgaaggttactgtataagtagagcacttaaaaatagtcactaggggctagagaagttactctgtggttcagagtacttgttgcttgtgcagtggaccagggttcagttcccagcagccacatgatggtttgcaactagcaattactccagttccaggggttctgatgccgcctttttacctctacaggcatcacacacacacacaaacatacatgcaggcaaaacatgaatacacacagagaaaataaatctttataaaaatgtaaaagacagccactagtatatttgttgtaagccttaaatgtattttggttcaatatcttttcataatttcctcaaattggataaaaacctctcttttctgtccgaagtcttaagagcaggtacaggtcaaaatgtacccttattgctgttcagggcacagtgccctggatgcttgagagctctctcccttagtcagaattaatctatcctcatattttatatgtcctaatttcattaaggacattaaatatggtgtaatgttcaattttaaaggtaaattaataggacagaagcacaccctgaaaatgatcaatagatgaaacctcaaattttctgggagtatgtgaggaaaatatttttaaaagcactgacttagttaattaggacccattgtatcagggaactactggcacgaggaaagagtgtagtccttcaagatcatcagctttagtttctccttttttccccttaacattgaacctgaatttgaaaccacatctttttggacagtctgtgtggggatgaggctgactgtggatgtatttattcggtgatttttagaactgaactaatgaacgtaaaggtatattctctattgtcccagagactgtgatccgtgtgaagtgctagtcatttgtgtggtttctatttgcataattcaagctcaaattaattaagaaactgaaagtcactcagaaaaagactatgtgttcatatttgggccactgtttatctgtctttggggtttcttgacctgtggttgaaatggtatgaaatagtatgattgcaaactatctgtgcatgtacctgtttgcatgcctattacttagaaaaacacttagtttttatcacataagtaataaatgtatctaagaggaatcctcctaaattgcaatgtatttcattaaagtgaaaaaaaaacacttccttttgatagactagtaacaacaaatatgaaattataaatcaaatactgctaatattttaggaaatgttttttatagtttaaaatatctcaaatttacattcttatgagagattaaccaatctttattctaaacttttgagaatagaattttattaattccaatatttgaaatatttcataccttgtggaattctgtagatactttccatcattatcaaaggaaagacatagaacgtattcttcctgtcttcacatattttgcagcatgttgaacaatctctgtctaataacactgggcaacaatgacatattgttgctaatagtgatataatttatcatcatcaccgtcatcacccaccagcatcatcagacatagaatctgacctatcccttccaggctgcccccagtgccctcccacttctgattgtcctgcctctaactgccaagcactgggattacagggctgctgtaacaggcctgtcttatgcagacacagagatcagacctggagcttgctgcgtgctagacaaacattctgccaactgagtggcatcctcacacatgttatctaaaggtgtccactgcccataatagagctgtgttccaggagttctccagtgcagagctatagcaggtcacttttggaattgtattcttaaatgtgtttataaaaatgccaaaatctagcccctgttctggactgacttgctctggtttcttttgtgttgttgatctaaaacagtaagcctcatagttactttgttatttatttgaactctcttaataaaattgtgttcagacacttgaataaaatagaggtgactttaatttattataaatcctgagtctacaaatcctgaaaacaagaactatgcccatggcatctgcagtttcattctgaccccttcagagtttctgcttgtatcttttaattctgattacatcatagtgggttacataagactattcttatgcaagcttatgaacgtactttggacatgtccttcccctccatacttgtatcctaagaattcatcctccccctctcttgcctctcttgcttctatcttgtctcttgcccccttgctcccacctcatcactcctttctccccttctctccatgtggctatggcggacctctccttttctgctctcttcttctctctgcctttctctgcctctactactctcctaactcccttccccatgccctaaataaactctattctatacttaaaaaaataataataataaaaaagaattcatcctcccaacccactccccccccccaaaaaaaaaacctctaatggattatagttggtgctggttacttctaactttgatactcccaaatagactggccacatccagtgtttttgaagatgatttccaggccatctgtgtatgcggaggaagatggaccactgttctatagccttgtcttcatcctgaaagctttctcctgaaaactcggctctcattattgtctcttttttaatctcaagtgcactttccaaacatttacaagaccgagactgacatcatttagcatttgtaaagaatggcttgagtcagcttgtatgataacatatctctagctatttagaactgcagcttcatttggacttctgaccttcaacatggctatatattgtgcaatctaaaaaagaaatattccactagccatttgctcctcaaacttgagggagcacttagccctaagcagcaattgaacatatgttttccaaatggcgtagatgccctttcttcagaatttaggaaagtagtacagtgatggctttcaactttcggctttgtcgtcctttgatcaccacacctgcctctctacttcataattcttggtaacgtcatttagttccagtatagtgtgggatactctgctaagctttgaggactaagacccctatgctgaagtaatagttacaaaatgagacggtacattggaatacactaaattgtcacgtttataggttacagttggtaaattattagcagtttcttgtagcttaatgtaatactgtgctgtcagtgcaatgtctgtaaaatgttaattaagacattagagcagaggcgtggtgttaggcgacagtggaaagcctggaaaggtgaatcatgattttggattgagaggaaaacataaaccctatttgctccatttaaggaccaggcatgattttgaaaaaaggctgtaaggcaccagctccaggaacagaacaaaaaatccagaacaagatcataaaaccccctctcaaagaatagcctggggataaccacaaaaatggagaaatatcttatctcagaatggggccatctgtgttgggcagccctatcttatcctgtggttaaacattcatgacataggaatgcagaccactggtcacctgtgaccccatagcacccaccaatgaaattttagattacccaatcctttagagagctcacccagtttcctataagaaaacttgtgtgcctttgtctggggtagccattttggagaatggctgagatctgctggatgtttctgcagaacactttttgtctttgcatgctatcagcagtatcttacaggataagagtattttgcatacaaagggaaaaccttgaagatcacaagtaccaaaacacattttgggaaatataaaatgcatgcaagctgctaaaaactcaagtagctacattggatgggttcagacttaccatttactaactgtaagaccataacatttacaggaaacttgcgctgtatctcagtgaactcaaggccaagctgggcaatgaaaagaataagaaaatgcaggggattcagctctgggacaaagctgttgtccagcaaatgtgggctctggtcccagtaaagaaggtgctatgaaaccatttcctgtcagtttctaaagctttcaagttctttgtcttttcaatgtggtcattgcatctaaaaaatgaagatcacattttaccaatgcataaggaggttgagcgcaggtcatagttctccaggggaaatctgaggagccatcaacaactgctccataaacttaactgaagtataagtcagtcgaattagttctttgaattgtagccctctagtgggcatgttgtggatgatgtcaaagtcaaccttgtgacagaaaaacagggatggagaatgaggaaccatccttgaagagtccttgaagaggcacgaactgttgcccatggctttagatctaagatggctcccggcacacaagtgggacagcaaaaaggaactgaggccagagtggtggctgattcctccatcttcatggaaggccacactgtggcaatactcccccgctccccacattccttctgagttacctcttaggcaaggttttgaactcagcagacagatccacagtccccagtagaggtaacacttccaggcattctaacatgccctggatcataggatcccgggatcgcccaggagcttggtcacaccagtttctcagggtctcagagaaagcttgactgcaaagaactcttgacacacccagaatctcaggatcacaggatcccagaatcacaggatcacagggaaagctgaactctgaggagttctgactcaaccgggattacaggaagtatgggctcccattagatatatcgagggcagggagcacttgagataatcagatggcaggaggcaagaataagaacagaagcaacagaaaccaaggttacttggcatcatcagaacccagctttcccaccatagcaagtcctgaatacaccatcacaccagaaaagcgagatatgtatccaaagtcacttcttatgttgatgatggaggactataagaaggacataaataactcccttacagaaatacaggagggcacaagtaaacaggtagaagcccttaaagaggaagcacaaaaatccattaaagaattacaggaaaacacatccaaacaggtgaaagaattgaacaaaaccatctaggatctgaaaatggaagaagaaacaataaagaaatcacaaagagagacaactctggagacagaaaccctaggaaagaagtcaggagccatagatgcaaccatcaccaacagaagacaagaaagagaagagagaatctcgggtgcagaagaaaccatagaaaacattgacacaacaatcaaagaaaatgcaaatgaaaaaagctcctaatccaagacatcccgggaatccaggacacaatgagaagatcaaatctaaggatagtaggaggatagaagaaggatttccaacttagagggccagtaaatatcttcaagaaaattataggagaaaacttcctcaacctaaagaaagagatcccgatgaaagaacaagaagcctacagaactccaaatactttgtcccagaaaagcaattcctcctgacacataataatcaaacaccaaatgcacaaacaaagaatattaaaatcactaagggaaaaagatcaagtaatatacaaagacagacctatcaggattacacccgacttctccccagagactatgaaagccagaagatcctgggcagatgtcatagagatgcaaagagaacacaaaagccagcccaggctactatacccagcaaaaccctgaattaccatagatggagaaaccacagtattccatgacaaaaccaaatttacacaatacctttctacaaatccagcccttcaaaggataataaagggaaaactctaacacaaggaggaaaactatgctctagaaaaagcaagaaaataatctttcaacaaacctaaaagaagatagccacatgaacagaattccaactctaacaacaaacataacaggaaacaacaatgacttttacttagtatcttttaatatcaatagactcaattgcccccccaaaaaagacatagactaatagctggttacgtaaacaggacccaacattttgctgcatataggaaatccacttcagtgacagagacagacactacctcagagtaaaaggctggaaaataattttctaagcaaaagggctgaagaaacaagctggagtagccagtctaatatcgaataaaatcgaatttcaacctaaagtcataaaaaaagtaaggagggacacttcatactcatcaaaggtaaaatttaccaagatgaactcttacttctgaacatctatgctccaaatgcaagggcatccacattcattaaagaaactttactaaagctcaaaacacacatagcaccacatacaataatagtgggaggcttcaacatctcactctcgtcaatggacagatcatggaaacagaaactgaacagagacacatgaaactaacagacttaacagatatctctagaacatttcatcccaaaacaaaagaatatatctttttctca

SEQ ID NO: 1051 - DNA, 2021 bp, Mus musculus
ttcttgctcttcgtacggcagccgagctgcctgcagccatggccttggccagagatgccaagctggagtcggacacctttcaggtgcttcaggacgtggccaatcgcctgcgaatccactcaatcagggccacgtgtgcctgcagctccggacatcccacgtcgtgctgtagtgtggcagagatcatggctgtgctcttcttccataccatgaggtacaaacaggcagacccagaacacccggacaatgaccgctttgtcctctccaagggccacgccgcgcccatcctctatgcggtttgggtggaggtgggccgtatctgtgaatcggacttgctgaacttgcgaaaaattcactgcgacctggagggtcatcccaccccacgactgtcgtttgttgatgtggcaacagggtcccttgggcaaggactgggtgctgcctgtggaatggcttacaccggcaaatactttgacaaggccagctaccgcgtgttctgcctcatgggggatggtgagtcctcggaaggttctgtctgggaggccttggcctttgcttcccactacaacttggacaatctcgtggcaatctttgacgtgaaccgcttgggacaaagcggcacagcacccctagagcactgtacagccgtttatgagaagcgctgccaagcgtttgggtggaatacttatgtggtggatggtcatgatgttgaagcactctgccaggccttttggaaagcagctcaagtcaagaataagcctactgccctgattgccaagaccttcaagggtagaggtattccaaatgtcgaggatgcggaaaattggcatggaaagcctataccaaaagacagagctgatgggattgtcaaattaattgagaatcggatacagacaaaccgaaatctcacaccgaaaccccccattgaagactcgcccaggatcagcatgtccaatacaaaaatgacctctctgcctgtctacaaactgggagacatgatagctactcgtgaagcatacggcttggctctggctaaattgggccaatctaaccaaagagttatcgttctagatggcgacacaaaaaactctaccttttcagaagtattcaagaaagagcaccctgagcgtttcatagagtgctttatcgctgagcaaaacatggtaagtgtggccctggggtgtgccacacgaggacgaactattgctttcgttagtacctttgctgccttcctgacccgagcctttgatcagatccgaatgggagccatctctcaaaccaacatcaacttcgttggttcccactgcggggtgtctgttggagaagacggaccttcccagatggccctggaggacctagccatgttcagaagcatccccaactgcactgttttctatccaagtgatgctgtctcgacagaacacgctgtttatctggcagccaacacgaagggaatgtgcttcattcgtaccactcggccaaaaacagcagttatttatacagctgaagaaaactttgtgattggacaggccaaggtgatccgccagagtgcagtcgacaaggtgacagttattggagcaggggttactctgcatgaagccttagtagctgctgaggagctttctcaacaagggatttttattcgtgtcattgacctgttcactatcaaacctctggatgctgtcaccattatccaaagtgccaaagccacaggtggccagatcatcactgtggaagatcactaccgagaaggtggcattggtgaagctgtgtgtgcagccatctctagagagcctgacatagtcgttcgtcaacttgcagtaacagaagtacctcgaagcgggaaacctagcgagctactggatatgtttggaatcagtgccagacacattatagcagctgtgaaagataccgtaatgaaatgaaattgcccaggcttcatacatcaaggttgttggctttggtcttaaactctgatatctttgtgctacatttatgcttgttgttataaaaaaatcttttat

SEQ ID NO: 1052 - protein, 629 aa, Mus musculus
LALRTAAELPAAMARDAKLESDTFQVLQDVANRLRIHSIRATCACSSGHPTSCCSVAEIMAVLFFHTMRYKQADPEHPDNDRFVLSKGHAAPILYAVWVEVGRICESDLLNLRKIHCDLEGHPTPRLSFVDVATGSLGQGLGAACGMAYTGKYFDKASYRVFCLMGDGESSEGSVWEAFASHYNLDNLVAIFDVNRLGQSGTAPLEHCTAVYEKRCQAFGWNTYVVDGHDVEALCQAFWKAAQVKNKPTALIAKTFKGRGIPNVEDAENWHGKPIPKDRADGIVKLIENRIQTNRNLTPKPPIEDSPRISMSNTKMTSLPVYKLGDMIATREAYGLAKLGQSNQRVIVLDGDTKNSTFSEVFKKEHPERFIECFIAEQNMVSVGCATRGRTIAFVSTFAAFLTRAFDQIRMGAISQTNINFVGSHCGVSVGEDGPSQMALEDLAMFRSIPNCTVFYPSDAVSTEHAVYLAANTKGMCFIRTWKTAVIYTAEENFVIGQAKVIRQSAVDKVTVIGAGVTLHEALVAAEELSQQGIFIRVIDLFTIKPLDAVTIIQSAKATGGQIITVEDHYREGGIGEAVCAAISREPDIVVRQLAVTEVPRSGKPSELLDMFGISARHIIAAVKDTVMK

SEQ ID NO: 1053 - DNA, 22808 bp, Homo sapiens
cccccaaaagatacattgaagtcctaaccactagtatcttagaatgtgaccctatctggagatctttacagaggtagttttagggtctttacagaaaggtaaaaatgagggtattagggtgtaccctaatccaatatggcagatgttcttatgaaaaggggaaatttagacacagagatatacatagagggaagatgacgtgaagacatagggagaaggcagccatccaaagtcagggagagagatcaggaacagatccatctctcagccatcagaaagaaccaaccctattgatacactaaattttgacttctagcctccagatctgagagacagtaagtttctgttgtttaagtcatccagcttgtgacactttgttgtagcagacctagcaaaccaatacattcatcagagcacatccactgccttcctcactccttcttctcaatcttgtcaagtaattccacttgcttgcattaaatctgatgatcagtactatcatttaaaaaatgttatggaacttacaagacaaagaactccctactttagtcctttattatctgacttctgtgtttctgcaataaaattatcttccttcctgtttctttctcaacttgacctatctttcctaacactaccaaaacaattttaaaaaacactactctgatcaagacactcaaatgatgaaaaaatttccattgtacttcaccctcagccccaaagcaagagaacatagcaaaacctcttacttgtctgtgtttcgaggccttttcaaaattgatcttcctgctttctctactgttctcaggatgaatctttccttcctttcagattagaaattctctctttttattctcataactttgcattgacttcctctcatatttactctaacaaaaattgtactcattctacaactgtactcatcttcagtggaagtattaccttttcaatgacatcttcctggtcactatctaagagtaagcacttgtttctatgccctggtataacatttggcacctattggcacactactgtaatcatgtgttgtgcctactttgtcttccctattaaagtccagtatctggagagcaagaaccatcttcaactcctccatagagcattacataaggttattatgtatcaagtatgcaataaagaaatgaataaattttcactattcagtcaaaaaaatctgctttggttctaaagcatgtaaaagcattgctttgaagataaactgttttaacttgtaaatgctataaacaatgttacaaggttgtttgtctacaaagcacaaccaaaagttaaatgttaaaataataagtggtggagattataacttgtccaccagtattggttcttccttttgtctttgtattataatctcctaagtttcagcagatcagtgggcaaattgcttcatttcacaaactcccttaatgttggctgtggctaggcaagtaagttctcaccaacagagaatgagaagtgaaatttacaatttctgggttgcttcctgaaaaagaaatagattgtccccctgtattctcgttttgttctattctttggtggcccaagtggtttctggcttcaattttgcagatgaggccaacacctgagtcaatgactaggcagccatgaaaagaatctgggaccctgtaaaacccacttgagcagagctgcctgacttccaagcatactctgagcatttatgtgaaggaaaaataaacttaaatcttgcttgagccacttccttttttttttttttttttttttttttggttattttgttactacagctacataccctgaaaaatatactacagtagagtaataaaaattgaacatttattctgaacaaagatgctggaataaccttccttaagcaccattctcaatagtaattttgatttatttgattgaatttcaataaagcttaatagccagtggtcataatgatgaccattagtcatcaaagaaaaggttaatgctccacatcccctttataagaagaaaggcagttatttgatatgttttagagaatttaatttaaaatcatacaaatgccaagggtttttgggtttatcagagcagtactaaatctctctggaaaatttaaccataacaatgaaatttttttgatagttcttaaaaattaaaatttcattagaccatgctttgagggacatctttttaaaatgacaccataagggttagtaacaattggtgtaattggaaattccaaagtcttctgggttcaagaagtaatataaatgtgggaatcagaggggtgctagacataaggagtagtgtgagttgggataccgttttctggagaatatatgcccagtataaagtattaacattcaaaacattttaaatgctgttctgaggctatgaggaagtaactggaatgagatttaccctccagccataaacaactagaaagctagacaaagtttataaggtaatagttttcatatattggaaaacaggcagcacaggatcgtggtctatgaaagagagaaaacattatctttctggctttcttcctagaggccctttccagacagtgctacagggaagggcatctgacacacagcatggcaaataaggcaacagagattggagctcaggaatcctatgttggctagcattttgaaggcagaatgattataaggagaaactgcccaaagagctccagaaatctttagagtacctttgcataaagcatacatcttacatggccaggaaaatgacaacttgggaaaggtgataaccaaacagttcccagaactcacagaagctaagccacacttgagtcctagccagccagagttgaggggcctgattgaacacaccggcgcattcggtggaaaccctggagagattatgcttttgtaggggagctaaactaacactagagtaaagcataccctacatttgccttaacagacttaaaatactcgaaaggaatgagtggcttctcagaacaaagtccaacactctttaaaaatatacaataaaataaaatccaacctcccaaaataatgtcaagcatttaatttaaaaactagatattccataaaactggacagtgtaacacattatcagaagaaaaattagttaatggaaacagagagaccgaataataggcttagtagacaaggacttttaaaaaaatcttcttaaaatatgctagaagggccaggcatagtggctcacgcctgtaataccaacaactttgggaggctgaggcaggcagatcacctgagatcaggagttcaagaccagtctggccaacatggcaaaaccccgtctctactaaaaatacaaaaaattagtcaggtgtagtgacacacacctgtagtcccagtaactgggcaggctgaggcaggagaatcgcttgaacctgggaggcaaaggttgcagtgagcaaagattgctccattgcactccagcctgggtgataagagtgaaactctgtctcaaaaaaagaaattttatatatatatatatatatatatattatatatatatatattctagaagaattaaaaggagattaatattatgaggacagtaagatataaagaagaaccaaatggaacttctaatgataaaaagtataatatttgaaataaaaaattcaaaggatgggattcagagcagattagacactgcagaagaaaaattcagtgaactttaagacactgcaatagaaactatccaaactgaagttcagaaggggaaagaataaaaaacaaaaaggaacagaacctcagagacagaaagcaaatcagtggagcctagggtgaagaataactgaatgccaaagcatacaggaatgtttgaggacgatagaaatattgaagttatattttgattgttgtgatagctaaatagaaataaacatttgccaaaattcattaatttgttggttaaatggattaatgttattactgttattgtttgttgtttgtaactcaatacatttgctaaaatattctagccaaaataaaatctcaacaaagggctgaatttgacctgaggatgggaaggagttaggtgggacatggcgcaagtactaatccactatttaatgcatacaatagtagtatctaataaaaatggtttatagaatgaattaaattcctctcatatatttaaagctgatcatactgatttacaatcagtaatataagtctaataccttggattttaaaaaattactattgctatcatttgttattatattttagttttcaaaagtaagagattttgttgtaatctacttcaaggttattatctggatggaaggaaaagcattttctccactaaatgtagctagtctatatgagaataaatccagctatatcattttcatatttccatcatacccaaccatctaggccagacagcaaatgaatatgataaggtatctgagtgttttctatacataaagcccatgtaccaagtttaaaaatcctagtttttgaagagatagtcaatgtaataacaacaacagcaacatagcaatagtaattatacaaaaaagaccaaagttgtaggtgtgtgggtgggaccaggcactgagaataaaaatactgagtaaactacattttctagagccccttctcttctactgtgagccgtcttgattgtttttcttgtttttttccctgattactagacttacaggagcttgtttaggggatctatttttgtatctcccagaaatgttttcagttgaagataacagaaactcattcataaagtgggaatatttaatttttttcttaacaaggagtctagaagaagctggtctcaaggcttgtggacccacgaagttatgaagaactcatactttctatttttccagtctaccgtactaagcacgttaacttttatctgtaggttttttttttttttaatcatggagtctcactccatcgcccaggctggagtgcagtggcgccacctcagctctctgcaacctccacctcccaagtttaagcaattctcttgcctcagcctcccaagtggctgggattactgatgtgcagcacgttgcccagctaagttttgtatttttagtagagacaggctttcaccatgttggccaggctggtctcaaattcctgccctcaggcaatccgcccacctcagcctcccaaagcgctgggcgttagccactgtgcccggcctgcactatttattttaatttcttttaggtttacaggaaaagtggctaataattgatctacagcgcctggccttatccttaggcttttggctgctatagctccaacacatcctctggtggtggtggtagaggggttgaaaagaatggctgggcgtggtgtctcatgcctgtaatcccagcgctttgggaggcggaggtgggcggatcacctgaggtcaggagttcaagaccagcctagtcaacatggtgaaacactgtctctactaaatgacagagcaacaagagcaaaactccatcccaaaaaaaaaaaaaaaagaagagatcacagttcttcttgtactctctcctgtttaccaggaagaaaatctttaatagaaattattaccagctgggagaccaggcaggaggatcacttgaggccaggagttcaaaaccagcctgagaaacatagcaataccccatctctaaaagaaagaaacgatgagaattattacacccaaagcagacttttacttacatcttattgaccagaactgggtcaataagtgctgactgccattactagccaaagggaatggcattgtgatgctggtcctacattaattatgattttctcctgggactaggagctgggccaagtttcttaaatttgttgccacctctctcttctgccccttctctctccaccgcaaaataaggacttgtaactgtggaaaaagtgggatagcatcctacagatgcatcataatagcatctgttaaaattttcaaagcaataatccaggaagataaagtacatttttctttccaggagacttattgccttacacaagaatcttattctcatttgctccatactttagcttccaaagccaaccaaatttaaacagtggaagcaaaagatgaattcagcatttatgtattttatataattccattttaacaaaacttaacagtttaaataagatttaagtaaaatttcagcgttcccaactcctaaatatcactcaccctcacatggcaaaatatctattttcacaaatcagtgtagacctactcagtaatcggtaattgtgtgttctgttttctctgctgcagctcagtagaaattacacttatcaattgctactatttaagtttttccctcatagctacttgtattggtaatcctgttagattttgttttcatgtgaagtacacgctataatgaatacttttagatactatgagaaaaaattaagtgaaaaatttaagcaaagttaaaacaaaaattattgctgcttttaaatagactttaaattggggtcaaaagtggcagcctgaaggtatattttatttttccaacaaaatgtttatacgtttttcaattttgaatgcctttaagtggtcttgtattctccagtttaacacaggcccctctaaccctcttatagctgacatccaagcactcgtggtaactccttatcccagtaggcacttgaatttgccaatctctgctttgtctggataaaccaagattaataataaatgaataatgttttcctatttgcagaacatttttgactggcttccaaaatgatctctaaaatgaataatgaacttttctccaagacaactacatttttggcgtgctggtttaaaagtttttggctgacattttgtcagccaaatagggtttggctcccctattttgtcttctaaataggggagaaggtggtatcacgtctttgtttgatttatttgacgaagttgtgttcccagccatattgggtaattttgcattatgaaattgtgcatactttaaacaagttgagtattctttagttgaaattatttgcttgagaccagaagtgttttggatttcaattaaaaaaaaatttggaatatctgcattatacttaacaacggaacattccaaatcagaaaaatcccaaatccaaaatgtcctttgagcagttcccctgagtaacatgtcagtgctcaaaatgtttcagattttggagcattggaaacatcagattttcaaatttgggatgctctacctgtatttatatattttcaattgtatattttaaaatatatttcaaatttaaaagactaaaatgcttaaagaaaataattaacagcttatatatgttatttatataacatattaatataaaattaattttatataaacttaatatatattacatatattgatatgagtttttatatataatatatatacttttatatatagtatatctttccagatattttactatatatatacttttatatatttttatatatatatatatatatatatctttccagagttccttttacaaaatctcagaatggtttataagtattttacacataatttataaaatattattttctatatagtataaaaaattcacacggtctcacagaatgatagagggaaattcacactcactatctagggtattaaatctccaagactacattcttctcttaataaaattgacctttgctaatgttaaaatttttttatttaatactttaggaaatagctgtgcaatgttttaaatgagtgaaagaatgtgggaacttggaaagaaatgttaagaagtcccatgtttttattcatgggaacattgcctcataaatcatttttgtactatcatgtttactaattgtgtggatttattagagttctttttggccaaaataatggtgagctacctgtgtttatattaactactttcctgtcagcctgtagtagtttgctattattttactgtgattattattttttctctaattcccatcttctgtactaccagttctagcctagtctgcttgtatttcctcctcctttatttgtctaaaaagataaacaagctttaatttgcaaaggacatggagagttatggatacatgatgacctcttaagaacttctccaatgccaacattcctgcaacaagtcttaaaatcagtagtgtcatattattactatttattctaatatgtgtccttaaaagttaaaatgatagaactagttgaaatagcaaataacatttgaaatatttttctgagatataatgcaagagataataagtataaagagtaacaacaccccctgagttagttgtttacaaccctgactgaacattgaaattgcctggggaagattttaaaattactgacgcctagatctattgcctagaaattctgatataattggtctggagtgcagcatggacatgagatgtttttaaaacttcccagataattctaaactacaactaatgttgagaaccactggtctcagactatctccagattatgttattaaccttgactacccattataatcaatggatgtattttagaaacatagcttcccagactccaggtccagaaattcaaattctatttttctgggatggaaccaggcattgtgtttcttatgtgccctaattttaacgtgaagttaaggtaagaattattgctcaagaaaccaagaggtttaacatcgcaatatgggaaggtatgatatattatcattgtgttttttttaattgttgttttattgatgacaaaccataaccttggcctgctagaagagttcaatggcacaaatttagttttttttgttttagacggagtctcgctctgtctcccaggctggagtgcagtggcacaatctgggctcactgcaagctccacctcccaggttcacgccattctcctgcctcagcctcccgagtagctgggactacaggtgcccatcaccacgcccagctaatttttttgtatttttagtagacacggggtttcaccgtgttagccaggatggtctcgaactcctgaccttgtgatccgcctgcctcggcctcccaaagtgctgggattacaggtgtgagccacagcacccggcccacaaatttagttttttaaagtaagtaactttgtcttaaaaatgatttgtagtaatagtcattaaaagataaactgaggcacattaaaatattaaagcatttatttgaccattcagtgattcatgaatctggtagctcctgataaaggagccaaggagaaggcttttatagggtgaatttggaagcaaaggaaagatatttgattggttaaagtggagtactagacttatttgggtcatcccagtggaaagtccccagttagaagttagctggcagtttctgattgattaagcttaaatttcctttttatcatttacactgatttgggtttcctttccttaggtaggaactcatggagctgaagctacctcagcctactggccttctaattatttcaacacagaaatagtactttacggcacactggagttgcaattctattctgcaattgggtggtttcagatttgttcttcctataaattttggtcaaattagtcattgcatttctttctataagtctgagattcagatatttggttgctctgagaaagtctctgttgagatagcattgccatactggtcagattgaaagtgactttgtatcctttctattaatgttctgatatgaaagagtgatgactcggatatagtgttaatgcattaaaaaagcacagcctgacaaatcgcttcctataatacacagaaaaatgtctagtcttgaatttataacacagggaaaggtaaaaaatttaattatgcttcctaatgttgaacatgcacgtgacaaagtaaatactaaaaatccattcagctgggcgtggacagggagagggaacggtgcacatcagagggtgcaggctactccaacgtttccgtttcctcagtctcgcgggaagctccgttgtgggcgccccggctggtggctgagctcaggccttcaggcagaggggaggcgagggcggggcggtcacgtgagagcactgccgcggtgggttgtgggggtgctgcggcgccgtttgctttgccaaaccgacaaaagagagatgatggccaacgacgccaagcccgacgtgaagaccgtgcaggtgctgcgggacacagccaaccgcctgcggatccattccatcagggccacgtgtgcctctggttctggccagctcacgtcgtgctgcagtgcagcggaggtcgtgtctgtcctcttcttccacacgatgaagtataaacagacagacccagaacacccggacaacgaccggttcatcctctccaggggacatgctgctcctatcctctatgctgcttgggtggaggtgggtgacatcagtgaatctgacttgctgaacctgaggaaacttcacagcgacttggagagacaccctaccccccgattgccgtttgttgacgtggcaacagggtccctaggtcagggattaggtactgcatgtggaatggcttatactggcaagtaccttgacaaggccagctaccgggtgttctgccttatgggagatggcgaatcctcagaaggctctgtgtgggaggcttttgcttttgcctcccactacaacttggacaatctcgtggcggtcttcgacgtgaaccgcttgggacaaagtggccctgcaccccttgagcatggcgcagacatctaccagaattgctgtgaagcctttggatggaatacttacttagtggatggccatgatgtggaggccttgtgccaagcattttggcaagcaagtcaagtgaagaacaagcctactgctatagttgccaagaccttcaaaggtcggggtattccaaatattgaggatgcagaaaattggcatggaaagccagtgccaaaagaaagagcagatgcaattgtcaaattaattgagagtcagatacagaccaatgagaatctcataccaaaatcgcctgtggaagactcacctcaaataagcatcacagatataaaaatgacctccccacctgcttacaaagttggtgacaagatagctactcagaaaacatatggtttggctctggctaaactgggccgtgcaaatgaaagagttattgttctgagtggtgacacgatgaactccaccttttctgagatattcaggaaagaacaccctgagcgtttcatagagtgtattattgctgaacaaaacatggtaagtgtggcactaggctgtgctacacgtggtcgaaccattgcttttgctggtgcttttgctgccttttttactagagcattcgatcagctccgaatgggagccatttctcaagccaatatcaaccttattggttcccactgtggggtatccactggagaagatggagtctcccagatggccctggaggatctagccatgttccgaagcattcccaattgtactgttttctatccaagtgatgccatctcgacagagcatgctatttatctagccgccaataccaagggaatgtgcttcattcgaaccagccaaccagaaactgcagttatttataccccacaagaaaattttgagattggccaggccaaggtggtccgccacggtgtcaatgataaagtcacagtaattggagctggagttactctccatgaagccttagaagctgctgaccatctttctcaacaaggtatttctgtccgtgtcatcgacccatttaccattaaacccctggatgccgccaccatcatctccagtgcaaaagccacaggcggccgagttatcacagtggaggatcactacagggaaggtggcattggagaagctgtttgtgcagctgtctccagggagcctgatatccttgttcatcaactggcagtgtcaggagtgcctcaacgtgggaaaactagtgaattgctggatatgtttggaatcagtaccagacacattatagcagccgtaacacttactttaatgaagtaaactaggcttatttctaaaaagtcaagtctattggctttggcccaaaagcactggtatctttgtattaaattcatgtttattgtcacaaaaccattatttatacctatacagttgtactgtttcttttaaagcaaagccatttaacatctttcttcattcctaatttggaaattaaagtttacctttctgttaatctatgtataaatgttactctgagttattaatgtggattttaaaattgtaagcaatagaataggaaataaaacaactacctaatacaaatatttctgataagactacaaatatctgactgagctggggattaaagtagaggtaactgtatcttaaatgagtatgatttccttgtaagttaaaaaaattgaaatttaattgtagacttcaatagtccaagttttgaaggatgtttgagcttttgtataatgccatttatacctgcagttttacagataatgtttgactgcagttgccttggaaattcctccaaagtttgccttcatctctcctctacagtttggaggtgatggtgcagcagtggaacatctcttgatgcaccacactacttgtgttctgtgaagtgatgaaagtataactggttctagtttgcacactacacacatagttttgtgaagcttcagaaatgttttttcttttccttgtggccaaaccagtttgttaatctgattatattcatctgctaatgatactaaagttaatgtaataaagcatttaaaaatcagatacttcagtctgtgctgtgtatgtgggatttgatttcttcctgatgaaatcctaaataaggagaacttgtgtctaaataagaaacagagagagtcatgacccccagaagcaaacctggaaaaaggttgaagctggagataagttactagagaagattgtatggactaaaaagccatcccttaagcagactcctgacttttggctgtcagtgtgtaaatatatgcttggagtacaagaaagtaccagtcaggcaaatcatagatggacccaaggttccaaactaaattaaattactctgtgtctatgtcaggtaattatttccttacttttattaccctcattaagttctttggaggcataaccaatttgtctcagcaatcattgtcttaggaggtataatagagccaaaaaatattaatactaacctgggaattagagaaaccaggctctcctcatctgctactacccgttttctctaagctaatttcctcttttgtaaaatgattacgaaaattgctctgttttttcataagatttaaaaattactttgtagaaataaaaagttgacataaaatcattgcagaagtttagaaaatgcaaataagtaaaatatgtttaccccccgtttcacacacacaaaaatcatttaattgtattcacagcatgttttctgtacatgctgtgaaagtgggcatgtaaaatggtctgtttccaaccaaacatgcataagcacacctttaataatgacagtagatcagattctttatgtctaatggaatctcagacaccaccagaaattatattttttgtagctggaggggaagcccttaggaatctctcttgtaaagactctgttccacaagttatcaaccagaggctatgagctccagagagaagaaatagcaggtgagtcttatgtccacaattcttcaagtacgaatcatatccagttttgctatattgaatgttctctagctttgaatctgtgctgagatctttaaagtgtccatgggaatcttaggagagaatcaacctgacatatgctaacccttgactgctaaagcttatgaagatgtacttttgatgaacaacatgatcactggtttaactctggccttctattcattgtttttgctgtgaaggtctattagattatcaataacctggtgatattccagggacagctgttgacaccagcagctgccttgcttatgtttgcagttctaaaggctgcagtcatctgagagtgacactggtcatttacatggtgaatggctccctggtcatttcctgatttctgtgaccctcagagatagcaaaagaaggaatcagtacactgaactttcattttatgttaccttatttaaatatatcaatggctcttaagctatatggaacttcaatggagagccctatttgggaaaaaaatataattttttaaaaagtaagaatcaatatttctgattttaaaattatgtaagagtaatgtgaactactcactgagttttagttatctcagtttcctgaactttacaggaatcactaaattctccagagtccaatcagagaggggttggtttgggaagttgagaagtattgaactgttttggtgacccttactatcatgatatggaagaaaggtcctggcacatttttgtggtagaatggaagagtgtactgttcttagagagaaactatcttctccatcctcctataagatagggaaggaggcactgaaccaattccctttactgacattggtaggggagagtttctataagagaattgctcacaaggtttggagttaacaccaagaaagggagacaggtatttcattgcaaggttggatgttgatttagacagggcttggtttcctgaccatagatagaactcctgggttagagcagaacaggttggcaaacactgacagtaggcaaaatctgccaccacctgtttttatataactgtaagataagaatggtttttacattttaaatggttgaaacaattagaagaggagtactatttcatgacatatgaaattcaaatttcagtgtccttgaataaagttttattggaacatagtcatgctcattcaactgggtatcatctgtggctgctttggagctacattggcagagttgagtagtaataatagtcaccttatagtctgcatagcctaaaatatttacaacctgactttttattattattattattatactttgagttttagggtacatgtgcacaatgtgcaggttagttacatatgtatacatgtgccatgctggtgcgctgcacccactaactcgtcatctagcattaggtatatctcccaatgctatccctcccccctccccccttcccccaccccacaacagtccccagagtgtgatgttccccttcctgtgtccatgtgttctcattgttcaattcccacctatgagtgagaatatgctacaacctgactttttagagtaaacgtttgcaaaccctgggagagagcattggggagagatgagggtgacagtatagacatgtggaggggataagggctcaccccttgaggcccaggcctccaggccacctctatatttgactacagagtgttaataagattggaggttgcaggcttgtcagagatcaccacactaagagtagagaggtacatgcctcagaaattctgtgtgatgcctgcaattgggaacaatagaaaagggtcccccagaaaaggaccaccaactgttagagtatctacttgctattaaacccttcagttgggatcagttggctctaaaccttgctgagtttttacatagatttgcagggttgtttaacagagagtgggcagtaatctatttggagaaactattgggaagagagatggagaaaagttgtgagagaactctcttcaactctcactgttataacaacgggggagagagggaaaactgagattgtagatttaaagggtgtatagttaaattttaatacaataaagctgttttaattactgaaaatgactgaaagtgttatgaacttacagacaacattaaacgtaatttatacataatgggtgggatacaggaggtttcaacagaatacagatgatagaggttaatgtaaaaataaaactattttgtgattacatataccagagttgagtaactgcaatcaaactggttatcctaagaagaaacataattctttgtacaatatttttagctattataaatttcatatttgtaatattgaaatatttttgtaataagttcatgaaaaaatgatttatgataagattaaaacaaaactttatttttgtttcccactatccctttaaaaggaatttaacgtgggtaaactaactgtggttctggatggaaagttggagagatccagtgactattcccatttgctcttaggtaatagaaagtactatagctactttacatcacaaaaatccaatctggattcagtgattacaatgtgtccagcttaacatattgcgcaatgcttgtcttgactaatattaagacttttgctttactttacctgaataaagagctatggctagcagctgctgaacctcaggaaaggatgtgttgttgccttcagtttcctattcccttcccttctccaagcctctacaacttgctagctgtagttgtagatcagaaaagggttggtaggggcaaaggagagaggagaaatcactctcatttggctggaagactctatgttccttgagttttgaatgtggttaaagctggtgcatcattgtacttatatctgtattttgcatatgcaagtatttctgaaatttagagaacctcatcactatgtcgtacattagaatgaatgcaaactgttagaaccaaatctgacagatatacaaacattcatttgcaagaaggcagaaaagcagccatgcaatgcgttgtaagctcagggaagttgccactctctaatatgaggcactttgaccaacaccctggataaatgtttgctccaagaggggcatgagtagattttgtaaaattcaaaattatgcagcagccactatggcatgggcacctaccactaagaatggatgctgacctaatcggaatctccctgcctgaaaggatgttttccttccctgaagacacatgaccacacagagctctagacttggagtacggatcctctaaaataagactgttttattttagatatccagattcttatatctcatggcttcaaatggtgagtgatatgcatacaatttccagtcaaatccatatcatggacacaacgtattcccccaattaaaaattattttaatatactgattaacaaaaatctatgttatgaattacagattagtagttttaatttcaaaagtaaactaagtatcctaagcatgtgtatgaaaactaacatacacacagacattcattcacatgtgtgtttatcatactacttttgctttttttcctttttgagatggagtctcgctctgttgcccaggttggaatgcagtggtgcaatctcagctcactgcaacctctgcctcccgggttcaagcgattctcctcccctagtctcttgagtagctgagattacaggtgccctccaccacatcctgctaatttttgtgtttttagtagagatggggttttgccacgttggccaggctggtcttgaactcctgacctcaagtgatctgcccgccttggcctcccaaagtgctgggattacaggcgtgagccactgcacctggcctatcatacttcttatacttaaatgttttaaagaaatttactagatgaatagtaaatggtactgtattgtcattttagagatgaggaagccaaagtgcagataaattatgtattcaaaatttctccaaggtcacatagctagcatgttgtagagcctgaatttaaagttatgtatctcatataattgtaacaataattttgaaatatgtatttcattattatccccatcatcacatatgagaaaacttactctcagaaagaaaatgttacttgtctatttgtttctaaaacttatttttcaattgcattatacctctttgcctccacatatttgactttccccctgaattacgttttctttctttctttttttttttttttttttgagacagagtctcgctctgttgcccaggctggagtgtggtgacgctatctctgctcactgcaagctctacctcccgggttcacgccattctcctgcctcagcctcccgagtagctgggactacaggtgcccgccaccacacttggctaacttttttgtatttttagtagagatggggtttcaccatgttcgccaggatggtctccatctcctgacctcttgatccgcccacctgggcctcccaaagtgctggaattacaggcgtgagccaccgtgcctggcctatgttttctatttaaatagattttttatgcagtataaatactaattttataaagacaaaatgttacaaaatagcaatagtgtggctccagctttaccagtgtgaccaatttctggaattataggaagaaaaagggaggaaatgcaaatttattctactgccttggcataggtcaagtctttgcacacatacctaacctctgcaactactctctaggaaaggaattaatgccaaatatatgttagatgttcattatattaaaacatctaattcaaccagctaacaagtgaattttatttattagaaatgaaatttatttattagaagtttgctgatttggttaattggtacttttaccttctttctggacaaacgcaaagatgttggaatgctttaactttatttataccaacctgccctcacagaaatggtgttgttttcatgtacattaaatctttttcatgtatttttgaattaaaaatctaataaactcttttgatgtctagcattcaaacaataaagtacacaaatcatttgtgcacagctcaatgaattttcagcaagtgaatacatttatctaactcatacctgcctgaagaattataacactacagtactctggaagccactttcttgtccccttccacagattacctcctcgtcctcctcaaagataaccactatttaaacttctaactctatagactatctttgcctggctttgaactttatgtaaatggaataatgcagtgtatgctattttatgtctgggtttatttgctcaatatggtgtttatgaaattttccatattgtaacctatacttgatgttcatttcattctctgctgtacagtatttcagatcatgaatatgccacagtgtatttatttaaattgttgatgaacatgtgggtgtatttatttgggggctattacaagtagtgctactatgaacattattgtaccagtattttggggaacacattaacttatttttattggttatataaatcaaggagaattactttcattggctgtacatatattcatccttagtatatactgccaaatgtttttacataaatgggtattctatttttatttgctattcttgcaaacttctccatagtcattatgctaatttatactctcatgtcagaaaatagactgggtgcagtggctcacgtctgtaatctcagcactttgggatgccgaggcgggtggatcacctgaggtcagggatttgagaccagcctggccaacatggtgaaaccctgtctctactaaaaatacaaaagttaactgggtgtggtggcacgtgcctgtaatcccagctactcaggaggctgaggcaggagaatcgcttgaacctgggagtcggaggttgcagtgagccgagatcttgccgctacactccagcctgggtgagactccatctcaaaaaagaaaagaaaagaaaagaaaagttcaggtgacacctcagtctccacaacatttggtttttgtcttttctctataggttgtttgtatattgttgatttttatgaatatatacgttggatatacaccctttattggaatataggtatttcaaatatcttctgtcactatgtgtatttccattttactcccttaagagtttcttctgatgaacagaagagttaattttgatgtactatttatcatttttctctctttggtttgcactttttgtattctgtttaaaacatctttgctttctccaagattattgaatatattttcttatgttttcctctgcaaatgttatatttttatcttttacatacaaatctacaattcacctggaattgatcattgtgtgtggtgtgaagttggggtcgagacgcgatttgttttttcatattgacacaactacatagcactgtttaaagaaaataccatcccttcacttactgcaccatggtgttatttttctcacaaatcaaaggactgtgcatgtgtagatctgtttctgtcctattggtctatttgtctattctgatgctcatactgtactgttttaattatcattgctttataataagctttaatattcagtagttaagttctccatttcctccactttttgttcttctttttcaagattgccttggctattgctggtcttttaattttcatataaattttaaaaccagactgacaatttccacaaaaattcagttgcatcttgatgctgttacatctggattatagttctttttaatcttccatttaaagagatcatattattaaatgtcctataggaagttaaactaaagagatcccattaaagtgcttctagcgagtgaagttcacagtcttcaaactgaggtaggcctactttggaaggatcttggtatgtcggcatggaagattttaagtgcgtctgcttccaggtcctgaagtccatgtttttgtttctaaaactgatctgtttgggaatacccctgtcatcatttccaatattgtctttcataattaccctttttctacttttcgaaagaaaggcatacttctttccattcttaatgttattattcattgacagttgtgaaattgtcacagcaccaaccaatacttcaaaatactggttctggcaaaacctccttaaatgaagtcactatgaaccagcagtaaatcatagtgtttttccttgttttactcctaatattggtgaaaatgaatcctgtaagtaggaagttactttaacccataaaaacatgttatgaattcaacatatattatagattggagtcgtggcaatgatcacaatttttgtttaataaagtcttttctcccatcactcaactattgtcaaaacactgttgctgagtatctcaggggagcaaagccaagaacaacagtaaggaatactgaagatggtagcacctgattcatgcagtctacaagttctgacaagtctctatgccttatctgtctatgcatttttgaagtggaatattcaagacttatgaaaggcattttcagtctcactaaggagaagaaatctggtaaagactctcattcggctggacgcagtggctcatgcctgtaatcctagcacattgggaggccgaggcaggcggatcatgaggtcaggagttcgagaccatcctgaccaatatggtgaaacaccgtctctactgaaaatacaaaaattagccaggcgtggtggcacgtgcctgtaatcccagctactcagtaggctgaggcaggagaatcgcttgaacttgggaggcagaggttgcagtgagtcgagatcctgccactgcactccagcctaggtgacagagtgagactccatctcaaaaaaagaaaagaaaacaaaagaaaaaaaaatggctgtcactcatttgtgctttgtatgataagatagaggaagttaaaatttgctatgtatttctggaagaccagtagattgttttcttttttccctactatttatttagattcataggagacatctgtttcttgacttgtgacaaaattcctggataatgtacgactatgtgcattttttcatgtgggtatcagattcccacttgtcactgatacaccatagctctgtttatttaccagtaacattcctggttatctctcatggtgtgtatttattccatgaacttactagatttacattaacctaacttcagtatactgtggattatactgtataaaaagagcatttaaaagataataatcaatgtacttgttttaaaccttatatttaccttcggtccaataccttttcctattttttatgttaatttccacaaattaggtaaaaatctgctctcttaatagtagaaatcttaagtgcgtgtgctgggcaaaatgtgctgctattacaatctaggccagtctagggcagagtgccctgcacttcagaaaacctgcttcttatagtcagaattaatttatccctctcagatgtgatatgtcattttaattctattggatgtattaaaaatatgtttaacaactgaatcataaaaggacacaaacattagtaacatgaccaaagctacatccttaaaataataattaaaaattaaatgtaaccttaaagtttctgggagtatgtaaggagaaaaattttaattccacaggtttagtttattggggctcatttgtgccaggtagacatgacaagttgctggcttgagaaatgaatccagcccataaaagtcatcctatttcagcaagaaggcttttctttatttttttctaacattgaatttgtactgaaatacctatagacaattgatttcctctgcttcctttccactctccctccctactttcttaaatctgtttcacaaacttttttgtgcccggctcttgaatcaagcatttattttgctattcaagtggcaattggtaaggagattgtaaggataaagagtaaatagcattgatgggcattcgggttgattccaagtctttgctattgtgaatagtgctgcaataaacacacatgtgcatgtgtctttatagtagaatgatttataatcctttggatatatacccagtaatgggattgctgggtcaa

SEQ ID NO: 1054 - DNA, 2808 bp, Homo sapiens
tcctcagtctcgcgggaagctccgttgtgggcgccccggctggtggctgagctcaggccttcaggcagaggggaggcgagggcggggcggtcacgtgagagcactgccgcggtgggttgtgggggtgctgcggcgccgtttgctttgccaaaccgacaaaagagagatgatggccaacgacgccaagcccgacgtgaagaccgtgcaggtgctgcgggacacagccaaccgcctgcggatccattccatcagggccacgtgtgcctctggttctggccagctcacgtcgtgctgcagtgcagcggaggtcgtgtctgtcctcttcttccacacgatgaagtataaacagacagacccagaacacccggacaacgaccggttcatcctctccaggggacatgctgctcctatcctctatgctgcttgggtggaggtgggtgacatcagtgaatctgacttgctgaacctgaggaaacttcacagcgacttggagagacaccctaccccccgattgccgtttgttgacgtggcaacagggtccctaggtcagggattaggtactgcatgtggaatggcttatactggcaagtaccttgacaaggccagctaccgggtgttctgccttatgggagatggcgaatcctcagaaggctctgtgtgggaggcttttgcttttgcctcccactacaacttggacaatctcgtggcggtcttcgacgtgaaccgcttgggacaaagtggccctgcaccccttgagcatggcgcagacatctaccagaattgctgtgaagcctttggatggaatacttacttagtggatggccatgatgtggaggccttgtgccaagcattttggcaagcaagtcaagtgaagaacaagcctactgctatagttgccaagaccttcaaaggtcggggtattccaaatattgaggatgcagaaaattggcatggaaagccagtgccaaaagaaagagcagatgcaattgtcaaattaattgagagtcagatacagaccaatgagaatctcataccaaaatcgcctgtggaagactcacctcaaataagcatcacagatataaaaatgacctccccacctgcttacaaagttggtgacaagatagctactcagaaaacatatggtttggctctggctaaactgggccgtgcaaatgaaagagttattgttctgagtggtgacacgatgaactccaccttttctgagatattcaggaaagaacaccctgagcgtttcatagagtgtattattgctgaacaaaacatggtaagtgtggcactaggctgtgctacacgtggtcgaaccattgcttttgctggtgcttttgctgccttttttactagagcattcgatcagctccgaatgggagccatttctcaagccaatatcaaccttattggttcccactgtggggtatccactggagaagatggagtctcccagatggccctggaggatctagccatgttccgaagcattcccaattgtactgttttctatccaagtgatgccatctcgacagagcatgctatttatctagccgccaataccaagggaatgtgcttcattcgaaccagccaaccagaaactgcagttatttataccccacaagaaaattttgagattggccaggccaaggtggtccgccacggtgtcaatgataaagtcacagtaattggagctggagttactctccatgaagccttagaagctgctgaccatctttctcaacaaggtatttctgtccgtgtcatcgacccatttaccattaaacccctggatgccgccaccatcatctccagtgcaaaagccacaggcggccgagttatcacagtggaggatcactacagggaaggtggcattggagaagctgtttgtgcagctgtctccagggagcctgatatccttgttcatcaactggcagtgtcaggagtgcctcaacgtgggaaaactagtgaattgctggatatgtttggaatcagtaccagacacattatagcagccgtaacacttactttaatgaagtaaactaggcttatttctaaaaagtcaagtctattggctttggcccaaaagcactggtatctttgtattaaattcatgtttattgtcacaaaaccattatttatacctatacagttgtactgtttcttttaaagcaaagccatttaacatctttcttcattcctaatttggaaattaaagtttacctttctgttaatctatgtataaatgttactctgagttattaatgtggattttaaaattgtaagcaatagaataggaaataaaacaactacctaatacaaatatttctgataagactacaaatatctgactgagctggggattaaagtagaggtaactgtatcttaaatgagtatgatttccttgtaagttaaaaaaattgaaatttaattgtagacttcaatagtccaagttttgaaggatgtttgagcttttgtataatgccatttatacctgcagttttacagataatgtttgactgcagttgccttggaaattcctccaaagtttgccttcatctctcctctacagtttggaggtgatggtgcagcagtggaacatctcttgatgcaccacactacttgtgttctgtgaagtgatgaaagtataactggttctagtttgcacactacacacatagttttgtgaagcttcagaaatgttttttcttttccttgtggccaaaccagtttgttaatctgattatattcatctgctaatgatactaaagttaatgtaataaagcatttaaaaatcagata

SEQ ID NO: 1055 - protein, 622 aa, Homo sapiens
MMANDAKPDVKTVQVLRDTANRLRIHSIRATCASGSGQLTSCCSAAEVVSVLFFHTMKYKQTDPEHPDNDRFILSRGHAAPILYAAWVEVGDISESDLLNLRKLHSDLERHPTPRLPFVDVATGSLGQGLGTACGMAYTGKYLDKASYRVFCLMGDGESSEGSVWEAFAFASHYNLDNLVAVFDVNRLGQSGPAPLEHGADIYQNCCEAFGWNTYLVDGHDVEALCQAFWQASQVKNKPTAIVAKTFKGRGIPNIEDAENWHGKPVPKERADAIVKLIESQIQTNENLIPKSPVEDSPQISITDIKMTSPPAYKVGDKIATQKTYGLAKLGRANERVIVLSGDTMNSTFSEIFRKEHPERFIECIIAEQNMVSVGCATRGRTIAFAGAFAAFFTRAFDQLRMGAISQANINLIGSHCGVSTGEDGVSQMALEDLAMFRSIPNCTVFYPSDAISTEHAIYLAANTKGMCFIRTSQPETAVIYTPQENFEIGQAKVVRHGVNDKVTVIGAGVTLHEALEAADHLSQQGISVRVIDPFTIKPLDAATIISSAKATGGRVITVEDHYREGGIGEAVCAAVSREPDILVHQLAVSGVPQRGKTSELLDMFGISTRHIIAAVTLTLMK

SEQ ID NO: 1056 - DNA, 101856 bp, Mus musculus
  misc_feature (1)...(101856): n = A,T,C or G
ggattaaaggtgtgtgccacacctggccattgcagggtttttgttatttatttatttatttattttggtttttccagacagggtttctctgtgtagccctggctgtcctggaactcactctgtagaccaggctggccttgaactcagaaatcttcctgcctctgcctctgctgggattaaaggtgtgcaccaccatgcccggcccggctatttgttttttaattttaatttaatttaatttattcatttaactgcctgactgctgctccgactcctggtcaccccccatcctccactgcagggttttgatagttacaaagatgttaggtcagatgcagggttagatcacagtgactaaaatcaagataatttggctctggcctgtatctttctatctctccataattttgaggtttagtcacttgtctcttgatacagcttctctctcttcatttcgtgcttctaccctaagattattcgagaggtctaccatggtcataccaaaaaaaaaaaaaaaaaaaatccaaagacaaacaaaagccaagaagtatgcacttgccacttaatggaatggtaatcctacagcctggtgtcttagttactattgctgtgatgaaagtctatgagcaaagcaacttagggaggaaacggtttatttggcttagacttccatatcactgttcatcactgaaggtggtcaggacaggaactcacacagggcaggaacctggaggcaggagctctgatataaaggccatgaaggaattctgcttactggcttgggccccaaggcttgctcagaacccaggaccaccagctcagggatggcaccacccacaatgggctgggctctcccccatcaattactaatttaaaaaatgccctggctgctgctttctaatgccagcgccgccgcctctcgcttgccaagctgcagctgaaggaaaaatggggtaaacataccatggcttgtacaaagcagactggccacaaatccaccggtggtaaagcacccaggaaacaacgggctacaaaagccgctcgcaagagtgcgccctctactggatgggtgaagaaacctcatcgttacaggcctggtactgtggcactcagtgaaatcagacactatcagaagtccactgaacttctgattagcaagctcccctttcagcgtctggttcgagaaattgctcaggacttcaaaacagatctgcgcttccagaatgcagttattggtgctttgcaggaggcaagtgaggcctatctggttggcctttttgaagataccactctgtgtgctatccatgccaaacgtgtaacaattatgccaaaagagatccagctagcacactgcatcgtggagaacgtgcttaagagtccactatgaggagaaatatttcattctcaaaaaaaatttttttccctctccttcctgttatcagtagttctgaatgttagatattttttccatggggtcaaaggtacctaagtatatgattgcgagtgaatttttaatataaatgcaagatgtaaagcattaatgcaagcaaaatgtttcagtgaacacatttcaacagttctactttataacaattataaataaacctgctaaaattttctggacaatgccagcatttggatttttaaaaaattagtaagtttctaattgatggcaactaaatggagtctgtagctctttttttgttttgttttttcaagacagggtttctctttatagccctggatgtcctggaactcactttgtagaccaggctggcctcaaactcagaaatcctcctgcttctgcctcctgagtgctgggattaaaggtgtgcgccaccatgcctggcttagcatttttatcacacagtagattccatccgttcactgtacttttctaactgggttgtcctacatacaagtacatgtttttaatgttgtctgtcttctgtgctgttcctgtaagtttgctattaaaatacattaaactatttttaaaaaaaaaggaaaaaaaagaaaatgctctacaggtctgcctacaacctgattttacagagatattttcttaattgaggctccctcctttcagataactctagcttatgtctagttggcaaaaacctatccatcacacttggagacaactccagtgaataggaaaagggtattgtgacaggagttagggacctgttctgttaatctgttcttttttttagatttatttatttatttattatatctaagtacactgtagctgtcttcagacacaccagaagagggagtcagatcttgttagggatgtttgtgagccaccatatggttgctgggatttgaactcaggaccttcggaagaacagtcgggtgctcttacctgctgagccatctcaccagctgttaatctgtttctaagtatcttctgtctaggtgcctgccatcttctgtaggccactgggctctgacccagccccactgagcatgtgtgctccctaggtttctcccacaacctacactaaagaatttccaaggggtggtgagatggttcagcaagagaagatgcttgaccaagcaatgaggacccaagtttgatttctggaacccacatgatggagggaaatagctgactccagcaagttgtcttctgacctccacatgagcacacatgtataatagatgtaataaaaatattttacagaaatttcctttttctcagcacgcctctgacatcgtgctttcctttctgtttttgaaggattgggaaaagcactttctggatgcgggtgccagcaagccgagtgactggaacagtgagctggatggggactggctgcagaagccaccatatgaggtgtgtggcttcttcctgcagtgactctgggtccttggggtggcccttgctcctgccccatttgtgctcttagaaaaggtattctcagtgacacaggaaaagaacacgctaagaatgacctggcaaggcaatttctctttgtaaacccatgatccaaacctgcttgcaaatacatgggtggaaaattcatttagtttttattctaacgcagttggtaactgtgtctgaaggagtttgataatactgacttgaggtttgttgcatttaaaggaattgcataagaagtgaaggaaaggtgagggataggttgctgcagtctatcaggttccaggaatgggggcagggcgcttttctttttcttttttttcttttcttttctttctttcttcctttccttcctttcttttcttttcttttcttttcttttcctttctttctttctttctttctttcttccttccttttggtgatgcttttcattaaaattaattagttaattaattaattaattaattaaaaaacagaggcatacagatccctgtctcaaaacacacacacacacacaaacacaaaatttgcatgggatttttatcaagagggaggaatgaaaagacttgaattcctttgcataaaattttgagttgcaggggaatttatggaatactggtccttggtgggctagccactagccacttttcataggaaaacaaaaaaggaaaaacaaagcaaccactcctcatctgtgattcaagcctggctagagtctgcttttgtaggatggcctgaaagctgagggcatcgacaaggacgtgtggctccaccagaagatgagacctgctggctacctgacgcagtatgacctctcagagtttgagaacattggcgccattggtctagagctgtggcaggtgatctggctccaagctttctttactttaatagctctgggctggccttgctgtgtaacccaggctggccttgaaatcatgatcctcttgcctcagctcctgagtgctgggatgctaggcatatgccactatggctgctgatttaatgacttgacctttaatgtgacccatttggtacacaattcttttcttcatgtgtgtgtctgtgagcatgtgtgtattatgcatgtctgagtatgggtgcatgtgtcggtgtgtgtatgtgttcatgtgtcagtgtttatatatgtgtgcatgtgtcattgtttcactatgtatgtgtgcatgtgtcagtgtgtatgtgtcagtgtgcatgtatgtatgtgtacatatttgtacatcagtgtgtatgtatgtgtgcatgtgtcaatgtgcatgtgtgtatgtgtgcatgtgccagtgtgtgtgtatatgtgtgtgtcagtgtatgatgtatgcatgtgggcagagaccagaagagaatgtctagtgtctagctataccactcttgagaataggaacctggagctagcttggcatccagtgagccccagtgtccttctgtctttgcctttccagcctccaaatgtaataggtacctatacaaacatgctggctttttatgtgtgagctgaactcagggcccttaatactttcccagtgagagcttacccaatgagccatttttccagcccttggtttattattctttaaagctgtatgtgtattgtgcatgtgcacatgtgtgcagtgcccatggaggccagagggtatctgatcctttggagcttgagtcacagaccattgtgagatacctggtacagatcctatgaactgaactgtggtgttcttcaagagtggtaagcgcccttaccctcagggcactccctccaggcctagcctgtaactactcattaaggacctttataatcactggcacttgcatgtggcctttagaccacacaggcctgacatttctgggctttggggtcccttctgtatagctgttgctcctgtcagctgtaggatatgcattaggggtggagcctggccttctgaagtcacagctagcctccagtcgatgcccacaacccacacttaggtgctagcaatgtaagccaggtcttcttgcctagtaagactatgctttacctttgggccatcctgagctatagtcagtcgatgatagcctgatcatgggtgtggcattgagctaagtacccctgacaagaaggaaaggttgtgtgtctgccaccactaatgaaagcctgcttccatccacaggtgagatctggaaccatctttgataacttcctgatcacagatgatgaagaatatgcagagaagtttggcaaggccacctggggagaaactaaggtaggtacaaaccccaaactcttttttttttttttttttttgaggtagggattcgatacatagaccatgctgaccttgaactcagagattggccttcctctgtctccaagagctaggattaagacatgcttgtacacccagctttctttaaaaaaaaatctgtaattatgtgtctgtgcacacgcgtgcagtgccgacagaggccattagactgcagtcacagcagatgtgagttgcctaaagtgggtgctgggaactaagctccttgagagaagcattatgtctaagccagccctctagcccttgctttttcttgtttctttctagagggaggggtctttgtatagcttcggctgccgtggaatttaccacacaatgtatgggacttcattcatattcttgcttcccaagtattgagttcacagatgtatgccagcatacagacaggggtatctatagtagttagtttctatctctctttaaaaaaaaagatttatttaatttattatatgtaagtacactagtacattttagctgtcttcagacaccagaagagggaatcaggtcttgttacagatggttgtgagctaccatgtgattgttgggatttgaactcaggacctctggaagagtagtcagagctcttgactactgagacatctctccagctcccagtttttatctctttagagataaggtcgtatgcattctcagattggccttaaccttgctgtatggtcaacaatgaccttggactaatgacctctgggcctgcatgtcaggtgggcaccaccatgcctgatttttcctatgctagctattgaatccagtgccaggcaagcattatcaactacaagcactctaccaatagagccacaagctctctatcaattgagctataagcattctaccaattgagctacaagcactataccaactgaactacaagcactctattatatgagtcccagccccagctccagtctgttttatttttgtcctttcctccagggtccagaaaaggagatggatgccatacaggccaaggaagaagtgaaaaaggcccgtgaagaagatgaggaggatctgctgatggggaagtttcacaggcacaaccatttcagcagattccacaggcagggcgaactatagtcatcctcactctgcatgctgagtggcccagctgcaactctaataatacacatttgaatgatcacatctacatggtcatttgtccagtttctgaaaaacaatcccctgtttgtgttagggtcccccatttcttctatagacccctatgaccccagggtctgcaataagtttctgttgacggcatgtggtggcacactcctttaatctcaggacttgagaggcagaagcagacagatctgggatttccacatcagcctggtccatgtagtgagttctaggacagcctgggacacatagtgagacactgtttaaatttttttccctgcatagaacagatcattgaaagccagagacctataagaatctggccataaacaatgtgcttttttttttttttgaaactcttaaatattttcatgaataaaagatgataaaataatttttaaaaatattttgttttacttttaaagatttattatttactttttgtaaaatgtgtgtgtgtatatctctgtttgtattgtactacatgcagttgcccattgaagccagaagagagcatcagatcctctggagcaggggtgggggtggtggtggtgggtggggtggtggtgttgtttgtttgtcatgggtgctggaaaatgaactcgggtcctctgggagagcagccagtgagtgctctttaccactgagccatctctccccagcccctctatttttcttttaaatcattttaaagatttatttatatgtataagtgttttgtctatgtagtggtttgaatgaaaatggcacccataggttcatatatttaaatgttagggagtggcactatttgaaaggattagtgggtatgtggccttgttggaggaagtgtgtcactggcggtgggctttgaggtttcaaaagcccacaccaggcccagtgtctctctggattagatataagtgctcagctactgctttaggaacatgcttttcctgctggttaccatgcatcctgccatcatggtcattgactctaagtctctggaactgtaaactccctccaccctcaccccgataaactctcttatacattgccttggctgtggtgtcttatagcaacagaaaagacaccaagtgctaggatgacaggtatgtgccatgatacatggctctatttccttaatccacccccctcccctttttttaagataatgtttcaccatgtagttctggctagcttatagctccttatgtagaccaggttgcctacaaacacatgagatctgactctgcctccttgagggctgagattaaaggcatgtgttaccacacctagctggaaaagtttttaaaatttttatgggctagagagatgagtctgtgattaagggcacttgctgctttctcagaggatctccgttcaattctcaatacctacatcaggcactggacaaccactgatgccctcttctggcctctgcaggtgtctgcacttatgtacacaaacacacatacacagagcttttaaaacaaagatttgtgttatgtgtatggtgaggcagctggtcacacagcatccattgtcctggcctccagcacatggaacaagtgtgtgtgtgtgtgtgggggggtcttccttcctcagcttagtctagaaattcacagttgtaacccagagctttgtctcctatatgattctagatcctgtgcagctggcaatcaggatcagtcacaactacctcaagaaatcaaacacagtgggactgagtgtggcggtatatgtgtaccatgtttcccagcacctgtgtagtggtttgaatgaggatgtcctaaggggcagcaagatagctcagtgggtaaagatgcttgcggccaaggctaacaacctgagtcctatctctgtgactcatggtggaaggggccatccaacacacaaatcttttaagatgtaagttaaaatgtaacttaaaaaaaaaaaaaaagacaaagaaataccagagtaggggctggtgagatggctcagtgggtaagagcacccgactgctcttctgaaggttcggagttcaaatcccagcaaccacatggtggctcacaaccatccttaacaagatctgactccctcttctggattgtctgaagatagctacagtgtacttacatataataaataaatgaatctttaaaaaaaaaaaaaaaaagaaataccagagtagctgaagatatagttagttggttaagggtgcttgttgcttttccagaggaccctagttctgttcccactcatatcgggggttgggggctcataagtgcttttaactccagctcaatggcatctaataaactcttctctcttgggcaggcattggcacgagcacagcaggcatatacacataaaaaaacaacaaaaaacaccagatgtcaggctacacccacatctgcaagcaatcagaacccaaatctgtttaacaagcatactgagnnnnnnnnnnnnnnnnnnnntttggttccccagcatcccagtgtggtactttataactacaggatactcccagtttcctgagaaccctattccttcttctggcctcagtgggcactaggcataaagttcggagtgcacatcccagccattcatggtggctcacaaccatccttaacaagatctgactccctcttctggatgtctgaagatagctacagtgtacttacatataataaataaatgaatctttaaaaaaaaaaaaaaaaagaaataccagagtagctgaagatatagttagttggttaagggtgcttgttgcttttccagaggaccctagttctgttcccactcatatcgggggttgggggctcataagtgcttttaactccagctcaatggcatctaataaactcttctctcttgggcaggcattggcacgagcacagcaggcatatacacataaaaaaacaacaaaaaacaccagatgtcaggctacacccacatctgcaagcaatcagaacccaaatctgtttaacaagcatactgagtggtactaacactgcatatggcccaagttagacttgagcaccatggtactttgttgtgtgccactgtctccatttccccgggaaaagttcagcaaaccctaggcattagtagaggctactagagtggagaagttaagacggtgcctgggtttagccaagctccgattcacagacccagactggaaagtgcagggagctggagtgcagcggtctggaagggagccctacctatcccttgggttccctgcctcacaggagcctccaaagccaggggctcggtttgcccactccaatcaggagatgcacacgaggccctccccacccccacagaccgactagcccgcccactctcggcccactaaacttacgaggctccgaaccttctagtcacgctgtgctttaggctaggctctctaaatcacccggtacggccaactctggtaaggctatgcgacagagccttccccataaaggctccgcctccagccagaactgccccgccctctccactgtgatcgaggctccgccctcttactgcaaaacttctcacgggaggacttggattcccttctgcgcacgtgtactctggtcctgtggcctgtccttgcgctggctgtgctgcgcgcgcatcgcatccctccttcgtactagtgcgcaggcacggccccgcccccgttccttcggcgctccggaggccgagtccgcacgaagatggcggcgccgcttgtacccctctcgcagcaggtatggtgctggggtgcgccgtggggcggtgcggacggtggttgccgcgagaaagataagtcgtcgcggaagcgcggctccaggggaccgcggaggcgcgcgctgaaggctcagaggctgagtggcgggggccgggcggttctgaaggtgacaggccggagcggcccgcatactcttgcgccgggcgacccccgagcggctgcgaagaggtgatggggcgcggccgctgcgtatgtctgctccgtctggggcctggccaggttaagggacgggggggggtttggggggtgggcgctgttgttcgagccgcgtcgcgcttcgtccccgcggaggcgagcgagagcggtgggcccgccgccagtctttgtctcccgcggggtcgggcgtcggggcgggtggtgtcccatactggagtcgcaaggggaaccgggacacgcccgcttcgcctctggccgcccagccctccttcccccgagatccgcttccgctgctctgtgcggtgcgaaaagcgcggatcctacgcccccaacggtatgcaccagtcttcgtcctcagggtcgctggatggttttcttgaacgtatcaaatgctacagggacgtacagaatagcagtgagaaggccattgtgcttctagcggaaaacattcattcattcttcagccactttctaacgtgcttgggatcaggtgcttgggagctcagcagtctctcactgacaaagtctctagttccaggtgacatccataagaattagaaagtattcctgtcctgctaatttgccaaattacccgtttgttccacacagcatattatatgcactttgctagaatcgtctttcgcagggtcatggttaccaggaggaagcattttatattcagatctcggctccaactctggaagagtgtccttgaagcaggcttcttaacctcagcatatcaattacctcatttggaaaatagagatgtaaaatgcattagcagaaaactgtggaaagcacattttgcctaacacattggaagctcttttgttacccgtcaataaattcgggtgtttgggactaagacaagagcaagtatgaatgccaaagctggtaagaactgcttggcaggctgatgcacccaggtcacctggtctgaaggagagggcaatacagggtggttaagtcctggaaggaccagccaccagcagccttgacactatattaacatgtggagaccagtagatattaattaacatgctcttacagcacctgtgattgtcttctgaaaatggttaaggactagacagatagtagggagtgtattgaggataggtgtgtattgagttagagccttgctatgtcacccaggctggcttccaattcctggactctctgcatcctcgtgctccaggcttccaagtgggatgacagaggaccagctgtgggtgttcacctctctcttgacaggttctcactggcctgtagttcctcaattaggccagcctggaaagtcagcaaggccagggagcctcctgtcccttcttctccagcacaagtgccgtgcatcctgtagcacttctgtgtgagctagctctggggagagaatttggatcctcgagcttttagggcaagcatgttactaactcagctggcttcagtccagtcattacctctgactttttttgagggagggtttttcaaatttcctaattttgacattagtcataatttggatttttaaaaatttgggccatagtagtagctgatagttattgagtacatgggagttggatacatgctgtcaattttttctcaaacaccagaatatcaaggaagcggttcctggccaagtataatgtcaactttcagctagcacttcagtaacagaaagttctagcctgggctataaaatgaggccctgtctggggaggagggatgctctattttattggtaaactagttaccgtaggatggcgttttgtcatactgagatgacagatacaaaaacatgagtcagtttcattagattcaccttgttagagcctctgggatagaatcctgattctctcttcctaacttgtgacttgccttccacatgctctccatggcaccatggtgtggtcagttctctgttcttcacatacctagctgtgttgtcagctatggtggccctgaagactgatccttctttctgaagcactccagccttttcttctctggcttggatccttctcttccttcagcagcagttcagatatcatccttcccagaggcctttgctagtcatggcacacagccatgtgcacatcatataatcctacagctctcttggtccacaggacatgtttgcgtgtctgttgtttctgtgtcagacctgttgccagtggaaagacactcagaaagtgtcacctaagtaggtatggggactgtgactgcacctgcagcagctcccgtgtggcctttcttccctgtgtgggatggagctgtgggtgggaacaggagctgaaacagcagttgaggagacatggcctgtggtggctcacaagttcaggtgccttctgagctgctttccctccacccccatgtttttgtggtgattctttaaatttttttgtatttattgatttattcctgtgggggccgttatgtaccatggtgcatgtggtagtcaaaggacaattttcctgcattggtactttgtgtgagttccaagtctttctgtgtagctcaggctggccccagacttctattgattttcctgccttagcctctagaggactgtgatcccagagcatgcctggttgcttcctacctcctggttagcagaaggcctggtccaggagccccacacctgcttttataagggcagtgtgctgagggttggttctgggtttcacacatgctcggcactactcactaagcaatccttatgttcatgtgtgctgagcgtgtgtgcggaggtcagagtactacctgggagttgggtctcttcttctgccatgtgggtcctgggcatcaaagtaagattgttaggcttggtgacaagtgtccttgttcaaccatctcattggcactaagttgcccaagctgaccttgaactcatggcagttctcttgccttgccgtcctaaatgccggggctacagatttgaatcacgtgctcagcttctataacttccccttttgtcttaagatttatttatttacatttatgtgcatgtgtctctctgagttatttgtatcaagtgtgtgcaggtgcccatggaggcaagaggatgtcagatcccctggaacaggaccttgatgtgggtgctgggaactgaacctaggtcctctgcaagagcagtaagcacggctgagccatttgttcagcagtctgtgtttatacttgctgctcagatatagatgttactattacccagacccttagagcaagcctaacagctcacataggatcacaaggaaaacagggcatggagagttctgggataccatttggctgaggtgtgctgaacagaaggctgtggtgtggttgagcccagccacaggatcagggagagtctctgctcctttttctcggcagccccaggggatgtttcctattgccctctgtctgctctcttctccccaatcccatcctgaactccctttcacaccagattgctcatgagtgacagcagacctccaggcctgcttctcttccagaggttctgtctggaacatagcctgagcccttacacacagcctcctcctgtgcccactcaccttccttctcctcagggttttttggcttcccatctctctgtcctttctctctgctctctggtcccagcctccttgctcagtactctaaacctgcctcctacagactcagacactgtctgcccttctgggggctgctggactctagaattggctactttctgaactcggcagttctgcagggcactgggcctaggcactgtctgtcagtcttgattcctccctttcttcctgctatcaccgtgggatcttctaactactattccctgactccagaacctttcgtggcttgtattctcacagggaggttaggtgtgtagctctgtggtaaagtgcctgccctctcaaagtgagtctgggcttgtgagccagcaccccacagtcctgttctgcccctttctggcctcacctgaccttgttgactgaccttgctattctggtctcatgtcctgacccctggctttccctcaccaacgttgatcttggagctgtggggcacaggtagtctgctgacttccctttcaccctcccggacctgagagatcattctgcccattgcatctgtgggttctttgttcataataagggtgccctaggctatccagcttcctcctggtatcatttcttatgtccaggggatttagtgacaccttcatgagccacaatccatggttgtaggtcatgattgtatctggtgctgtggtgaaacccaggcccttgcacgtgccaggtagtgcttactggcaagctattcctcccagccttgtaaaaagaatctgtttattggatgagaaaaacctgatacccatagtagccaggtgacttgtgaaagccccatagccatgtgtcccattagagttaaaccattggttgcttgctgtggagctccctccaacaccattcttccacatagcctgctgagcgagcatcctgcgtagagctctggccagactagtgtgtctggaatgcagggcctagggacattcatttgtccccttgtgcctgtgctgttttcaaggctctttttggaaggctggtgactgtgccattgccttgatggacagagaacatggtaggggcagatttgtcctctgctggagctccagagtccctggctgctttgttgacctgcagtgcctgttgtttttgttgttgttgttgttttgttttgttttgtttgtttttttctgactcctgaagccttgtcaaacaagatcacatgctttctccctcagccccagttcccatgcctgtctttgagcctgggtcagctgctctgaagagccaagtaactgtctttacatgaggtggctctggaggctgagcttcactttggcctcctcagcttggcttcactggagcagccagtgtccctctagaaagttggtctatgcagtggatctaggtgggcagcctatcatccagcattagggagcagagagaagtatttctgtaaattgaggactagcctgggttacatggttccaggtgaggcagaactacagagtcaaacctgactaaacaaaacagtagagagacacagagagagagacagagagagagagagagcatgtgggacagacagacaaagagcatacatgggctgactgtatcttaggttatcttcttggacaccctgtcattgttgtggttgctgactgtgtagaggggtaagctgaggtcagaaccatctggtccctggctgggctgtgcctggcagcctcacctggcctgggtctctgacctagctctttctattgtgcttcagtttcctgtcctggaaggattgttttcaggtatcagtatgacattgatatcactggctgactgcagtgactgtctcttagagacctgcctattgcttatatccttgtactttcttttaaagaacatttttatatttgtgtgattgtgaacatgccactactgtgtgtggtcagaggacaacttctctcctaccttgtgaatccagggctggagcctgggtcttcaggctgggctcttcctgctgatcatccatctggctatctttatattgtatgcattttgggggagagggttaagacaggttaagaggttaagacaatctgctcctaaacttgccattctgcatcctcagctgcctaaggctgaccacacctggcttctacactggtgtgtgcctagattgcaaatgagtcctgacaaagctgataggtggctgcttgttcgaacgctggcctgaggccaagggtttcagggggggtgacatctagtcactgtccttaggcagggccacaacttgccactggacagggtagtgactccattggcccagggcatgatggtttccactccctctgtaatttaggccattagccactgtgtctgatgtgggcttagaagcatctgtgcttggtttgctgtaggagtgcagggctctgaaccagagcctccttcatgtatcttaggctaatgctttcttctactttccatccccagtgatcccagcaaggttccgatggcacaacagttggggcctcaggcccctgcgcctgctctatgggagagctttcactctctgattacagacagcgttgcctcttactgactgaaagcagtgacagacaccagaaaccctggtggcacatcagggttcccacacctagcactgcttgccctgtgggctgtcctgaggcctttgtacctgcagtatcctgactggaatagccatctccttctctctcttcagctgctttgcctgcctcagctgagctgtctcctcctcagagaggccttttctcacaaacagctggctggtgtgatggactcttttctctttgctacatgtctgtttatgatttatgtattatttcaaactctctgtctcatttaaaacaaaacaaaaacatattttgagtgaggctgtcatggtgcccaggctgaaactccttaagtagaggatgacgaccttgcagtatgatctccctccccatccctcccagagtggggatgatgggtgtgaaccaccaagactgctctaccaactgagctatagttctggccttaagaaatttattgggggggggggtagagagatggctcagcaaccgctcttccagagaacctgggtttaattcccagcacccacatgtcagcttacaactgtctgtaactccatctgacaccctcacacagacatacatgtaggcaaaacaccaatgcacattaaataaaaataagttcaaaaaaaaagaaagaaataggcgggcagtggtggcacatgcctttaatcccagcacttgggaggtagaggcaggcagatttctaaattcgaggccaccctggtctacagaaccctgtctcgaggaaaaaagaaagaaggaaatttattttgtggcaggctctcccagtgtggctcaggctgtcctcaaagttttcacctacgtgcttcagcctcatgaatagctgggggtgagggggtggggggtggtgcacagcagccactgttcctggcttgggaattcctgggtagagtgactgatccctgacatattacctctcccacccatgccttatcattcattctgcatcccagggcgtggctgcatgttcacagcagagctgtcagaggagtcatgaaaccctgggtggggctgggtgctgtgtactgccacgggacagcctgctggacaggatgtgcggtgtcaagatatgcagtcaagaggaggacgcagtagccatgtacctgtgagatggcgtagtgcgtagaggtctgatgatttcaatccagttctggaagccacatataggagagatccaactcctacaagttgtcctctgacttccacaggcactgtgcccatgcatgtcctcccaagtaaacaaatgaatgaaagaagtagccattggctgtgcacaccagaggctaagaccagccttaagctccagggcagccacaggctacttctcacctctgctttacctctttggcacagatgtccattggagggtggggaggccctcatcacagggaactagcctgaccttcctccagcctcctagcccttatttttttggtgttgggaatggaagccatcaactcgcacatgctaggcaaatagctgaggacggttttctttgctgggaaatgtaaaattgaaaagcataccccttttggattaagagaagccaattttcaggcaggtatgtgactgtagtatttatcagcattattacccccattggactggatgagcctcaggtcataccccccttcccccgcatctgttggggtcccagatgcagctgtgctctggtggggtctggcaggcatttacctcttgggttttgttctctggggatctctcaggttgtccctttcactcctgctagctttggaaacttggaataggagctggtaagtggggctatggctcacactggaccatgtgacgaatagagcatagcttgtggcaggtgtgtaggggtccctgagtccttatctttgcccctgcaactccagctcgaacagtgtgaaaaatgcaaggagaaggagggttcaggactggcctccgtgagtcagaacttaagaagcactcttcccctcagttggggcccagggcatagggatgggagagacacactgcccaggacagtggctcagtcctggttggggagcagtcagccccagcactcaacacagaaaccattgtgacatccaggggtgacagtgtcttgatgttttatgaatctcatctcatcaggcagaaaaagaaaggaagggtgggatgctgccatgagtgtgactgcgggtgcatgagcagatgtgtgtgtttatacaggagtgcactaacctgccatgatctctttatggttttctgagattgatatggggcgttcagtagagacaacctgagatggtggagttgctctgcctgctcctcttgttaggcaggagagaggctgggttgtccttctaggcctagtcagtagtgctgtgttcttgtctgtggaaacggttgaggagaggccagttgactcctgtttgtgtcagttgactggactatggctcaagatcctggagctcagcacctgctgtctaaggacccaggcagtgggggcagtgaccaaggccgatgatgacagtgattgtccagactgggaaggaaggatgggctggccagcaaggctcagggtgggtgtgaagagtcctgtcagtttgtaagcatcttgtagaggaggctgggagcctaggtcacctggtagcaattgatgctctatgctttccactagttccacacatggagaaaggacaagtggcctccggttggggtcggtacactcagctagggtgtctctagattattcatttcatggaactgtttgggaatctaaacattttcctggctccactttctcattcactttgaatggaccaagtattcaaacacatcagtctgggggccaaacctactcaaaccactatcttctaccctctgccagctcctccagccacctgtcctatggacagagaaacatggttcaaggttggaactccagagaacatggaagaggcaagccagctactaccaagaaagccctgtcagaatggccccaccacaccatgtgtagttttcaacctttggtctttttctgtggctctggagatggaagcaggaccttgagctgtggtgtggggctccgtgtctccttctttacttgaccagtgcttggcagctgtgctatctgtggcccaagctaaggcatcctttctgctgtgctctgtctgtctcaggagtctattggtttggtcagtcctcagtggcttaccatccctgtctgtccatttctgacttcaggaggaaacagccctgtcactcttcctgccctgcacatctggacaggtttttcttgtgtacttcacgttgctgctgtagctgggggttcagatgtgtgctagcactggaacccagggcctcacacaggctcagaactcttcttcccataagactcatcctgctcaaaatggcagctcttcagggttggacaagagcctggtcttgttggtggaaaagttctctcttctctcaacatctgcaggtcagtcaacagcctggctgttctggttcctggcagagcagaaatgcttgaccatggtcttctacacagaggcctgatgtgctagagggagaggaagggccgaatgacagcataaactcaccacaggtagccacactctgccatctctgcaccagtctttccaagcccctcacccagccacatgcacaatttttgtttcgcttttcattgtagagtagggtctcactatgtggtctccctatatggcccaggctgacctggagcccttcatctcttgtctcagctttagctcactgagataaggcaggtaccgccatcccagctcagacctatttctttaattctaaggtctttttttttttaaagatttatttattattatatctaagtatactgtagcagtcttcagacgcaccagaagagggtgtcagatctcattacagatggatgtgagccaccatgtggttgctggaatttgaactcaggaccttcgtaagagcaatctgttctcttaactgctgagccagttctccagcccccccctttttttttttttggttattgaaatggaattgcaagtggctcggggtgacctctaacttgctatgtagctaagaatgaccttgaccttggctttagagttggggtacatgagtgtgtgcatgtacatacacagacacaaaaagaaacagtgagattgttgtagtcatgtgcacctgtgacagtggtctccccctccctctcatgctttcctctgtcctccaattccccagcaatcagcagctggttgttggtatagcaagcagtcaccttttgggactggcctcttgtgctcagtctctggttgctttgtgtggccatagtgtctgtgtggtagttttctagattatcctgttatcctattgtatttgtatgtgttgtgcttaagtctatggtacattttcactttaatttttgtgtgtgcctgggtgtatgtaaatacatgtgtgtacttacgcatgtggagcctgggagagtagtgttgagtgtctcctattgctctcaaccttgtctttaaaatttttaaattttgtgtcctatatgtgcttgtccacaagactgtcacggtgttcctgtagaggtcagaggttggcttctaccttggaggattcagcggtcaaactgaggttgtcaaggctttgtgacaggtatccttactagctgagccataccactggctcagccttatcttttgagaacctctaattgggccnnnnnnnnnnnnnnnnnnnntctcagctctgggtccccacagctccttactagagttactgatgttttcaaccacaccaaacctttctttgttttcttttaaatgtgcctgctagggatctgagtcaagtctgcatactgcactgcaggcacttaccagacagcaccttctcagtctgggctgtgctcccagctcccacttccttgtccatttccctctgccttcctcccagcttgtttttttttttttaatttttttagaaatttttatttattattatatctaagtaccctgtagttgtcttcagacacaccagaagaggacgtcagatctcattatggatggttgtgagccaccatgtggttgctgggatttgaactcaggacctttggaagaacagtcggtgctctttaccactgagccatctctccagccccctcccagcttgttgagctatatcttggcctttaagtatgttcttttggagggggggtggtgctgagctagtaattcccctgcctcagcctctaaggaatggattgccctcgaactgtgtctaatatgttccatcagtgtctgctgagttgactctctgggagccatgactctgtgactatgtaggctaatgacagggtgctttacacaccagctcttactgttgaagagtggaggccctggacagctgcagcattgtttagtttggggtttttagcagctccctgctcagcagttgccccaggggcatttagtttcggtttctctgctggctcctgtcatccagcatctttgcaccccccccccccccaaccctgtctgtgtatttactggaaccgtccttgtgtgttttgccactcattggacagtgctgtgtaggaggatgagtattctgtagacaccctgacccctttgtctcccactgttcttctgtgagcatttgaattccggcagcttgagttagtctttcactgtagtatcaggtctaaggactcatttttatttgtcacttcagtgctgtggatggaacctggtaccgtgtatgctcaggaagtatggctcatgggaacctgggttatggcatgctcattaagcactggagatgaaccggcctgaatgtgcagcctaggttctgtacatgagcagcaggcaccccagcttctctgtcttcatctatccctgaatcctaaagatttttcctgaatgttttttatatgtatgtatgtttatatatgtgtgtgtgtgtgtgtgtgtgtgtatatatatatatatatattttttttttttttttttggtttttcgagacagggtttctctgtatagccctggctgtcctgtcactttgtagaccaggctggcctctaactcagaaatccgactgcctctgcctcccgagtgctgagattaaaggtgtgcgccaccacgcccagcatgttttatatttttgcattttatactgaatgaagtcatgatcatttgagtttttacctgtatcatttatatatcaccagtgtgtaatctgcaggctgagagccacttagttctgtgttgctccagcactgtgcagaaaactctccttccagttaccgggctacctccccccttccagcttttgaatgaggctcttggtgtggcttctacttctttaaaaaatattacacttatttatgttagggcactatattgtgttcgtggaggtcagaggacaacttgccaagaggtaggggtcaaactcaggcctcagacttgggagcaagcacatttagccactgggccatctctcctgctctgcttttattagactccattggaacagggctagaagtgtagctccgtggtggagcccttgcctagcatgtacggaactcaaggtcccacctctagcattgcaaacataggctgtcattcaggcagtgtggtgctgcctgcccacctgcagtcccagggctacacagagaaaccctgtctcgaaaaaccaaaaataaaaaataaataaataaaacttttttaaaacattttttaaaaattaagaagctactaaaggtgcttgctgctaagcctgttgattacctacatggtggatgagaactgactcttaaaagttgtcttctgacacccggatgcactgtggcatacacatgcacaggcatgttatttagtgctgcctttctgtatcagtctgagaatgattccatagttaacagaagtctggctggagttcagggaagtggcttaagcctgcacatctgggacacacaagttagtatttgcagttgcattgtttgacctccagagcaggactcagaatttgtttgtatgcctctgccagctctgttccatggctggtcttgactttgctgagtagacagcaaggctggcacctcattctgttctataatgcaggctacatatttctttgctaaaaaccccaagtgggttttttgagctccacgatacaatagttctttatgggcatgactctgcaggcagtaagttgcacacctgaccttctgggactggcttgcatgaaatatgctaggaagtttgctagggtatgtgtgcaaggctcctgggaacagctgagttctgtgtttagatttgagcctaatccagaagatggtgctgtgtgatatgaaaagtacccataacctgaaagagccccaggtaggaagccctgttggctggacactttgcagccagatgttctcccagcacagctgcaagtgaggaacagtgtcctcctgtcctagcagtgtagcctgacttctttatggtctatcttgttcctcatttttacctttatttatttgttgaaatgctgagaataaaacctaggactgtgtctgtgcaaattgatgccctgctaagccacaggtctgtttctttgttaattttaaaataattttatcccctcaacagaggaatggatacagaaaatgtggtacatttacacaatggagtactactcagctattaaaaagaatgaatttatgaannnnnnnnnnnnnnnnnnnnnnnnnnnnnnnnnnnnnnnnnnnnnnnnnnnnnnnnnnnnnntccatctcgcccaagcatcacagctaaaactggcccgtagctggtagcaccaagtcactatgacacacaccttgataagaaacgcacatcccaatatgtcaactgcagattttaaggtgtcagagccatgaggtgactcagcaggttaaggcagttgctgctaagcctaataaactgagttcaatccccgagacccatagagtagatgtgtggcatagtgtgggcataggtatatactcgcccatccccatgcacaagacacataaattaatatattttccctgatatagctgtctcttgtgaggctatgtcggggcctggcaaacacagaagtggatgctcacagtcagctattggatggaacacaaggcccccaatggaggagctagagaaagtacccaaggagctaaaggggtctgcaaccctataggtggaacaacattatgaactaaccagtacccccggagctcgtgtctctagctgcatatgtatcagaaagatggcctagtcggccatcactggaaagagaggcccattgaacttgcaaactttatatgcctcagtacaggggaacgccagggccaaaaagtgggagtgggtgggtaggggagtgggtgggagggtatgggggactttttgggatagcattggaaatgtaaatgaggaaaatacctaataaaaagtaaaaaaaaaataataataataattttattgtagccaggcatggtggtgcatgcctttaatcccagcacccgggaggcagaggcaggcagatttctgagttcgaagccagcctggtctacagagtgagttccaggtcagccagggctacacagggaaaccctgtctcgaaaaacaaataaaataaaataataattttattattatggaggaggtaaagcatgtgccacattgtgtgtggcggtcagagtgggcataatgtgtatggcagtcagatggcacagtgtgtatataaagccatctcttttgcttccatctttatgtaggttctgggattgaagctaggtcaccagatgtgatagtttgaatgcaaatggccctcatagaccatatatttgatagaatggcactatttgaaagaattgtatggattaaaaggtgtggccttcaactaaatnnnnnnnnnnnnnnnnnnnnaggaatggatacagaaaaatgtggtacatttacacaatggagtactactcagctattaaaaagaatgaatttatgaaattcctaggcaaatggatggacctcgagggtatcatcctgagtgaggtaacccaatcacaaaagaactcacacaatatgtactcactgataagtggatattagcccagaaacttaggatacccaagatataagatacaatttgctaaatgcatgaaactcaagaagaacgaagaccaaagtgtggacactttgccccttcttagaattgggaacaaaacacccatggaaggatttacagagacaaagtttggagctgtgtcaaaaggatggaccatctaaagcctgccatatccagggttccatcccataatcagcttccaaacgctgacaccattgcatatactagcaagattttgctgaaaggacccagatatagttgtctcttgtgagactatgccggggcctagcaaatacagaagtggatgctcacagtcagctattggatggatcacagggcccccaatggaggagctagagaaagtacccaaggagctaaagggatctgcaaccctataggtagaacaacattatgaactagccagtaccctggagctcttgactctagctgcatatgcatcaaaagatggcctagtcggccatcactggaaagagaggcccattgaacttgcaaactttatatgcctcagtacaggggaacaccaggtccaaaaagtgggagtgggtgggtaggggagtgggtgggagggtatgggggacttttgggataacattggaaatgtaaatgaggaaaatacctaataaaaagtaaaaaaataataataataataattttattgtagccaggcatggtggtgcatgcctttaatcccagcacccgggaggcagaggcaggcagatttctgagttcgaagccagcctggtctacagagtgagttccaggtcagccagggctacacagggaaaccctgtctcgaaaaacaaataaaataaaataataataattttacaggaggtaaagcatgtgccacattgtgtgtggcggtcagagtgggcataatgtgtatggcagtcagatggcacagtgtgtatataaagccatctcttttcttccatactttatgtaggtctctgggattgaagctaggtcaccaggtgtgatagtttgaatgcaaatggccctcannnnnnnnnnnnnnnnnnnncatgtgccacattgtgtgtggcggtcagagtgggcataatgtgtatggcagtcagatggcacagtgtgtatataaagccatctcttttcttccatctttatgtaggttctgggattgaagctaggtcaccagatgtgatagtttgaatgcaaatggccctcatagaccatatatttgatagaatggcactatttgaaagaattgtatggattaaaaggtgtggccttcaactaaatagcttactgggatggtccgaggcccctggcacatgtgtagcagaaaattgccttgtctggcctcagtgggagaagatgcgcctgtctagtcctgtagagatgtaattgcctgggggggtgggaaagagggagagctcccttttagaggtaaaggggaggggagatggggtaaagaactcaactctgagaggggagactaggaggatgtcctgacccacgggatagtcgaacaggggtttgaggggcacctggaagagaatggggacaagaaacacaaaaaaaaacgacagcaagacaaggtcctgttcaagctgacaaatttttatttttcccacacaggttatataggagcaggaagaggggtggagggagggggtcaggaacaagatattgactgggtaaacagttcagcagaagatcagaacagaatgggttgttaggcacctatgcacaagatgtatagctatttgttctcggctgacttcaggatctatgtctatttgtactcagctgggctagtactttcccacagaggccaagactttctaagtaagcacttatggctgactaggcagttaacattcaaagagggtcgctcccaacagaaggacgcaacatttggaacataaataaataaagtaattaattaaaaatgtaatagaaaagaggtgtggccttgttagagaaggtatgtcactgggggtgagttttgaggtttcaaaagtccaagccaagccctgagtgtctgtctctctctgcttacagatcatatacagctactgcctctgcttgtgtactgccatgctcctactatgttgataatggactaagcctctgaaactaaaaacccttttgctatggtcctggtattttattacagcaatagaacagtgacttaagacaccaaacttgcaagatgtcttaattattgggtcatcttgccagcccagtttttttgttgtttttattttttcaagatagggtgtcactatgtagccctggctgtcctggaactcaaccttgtagaccaggctggcctcaaaaactgcctctctagtgctaggttagtgtgcaccaccattgcccccagtttttaaaaaaaaccaaaaaacattttttgaaacaggttcttatatagctgaggttggccttagacttactatctaaccagcaatgacctttacctttctgtcctgcctacctctcctgagtgctgggattatttatgtggttgtagaggtggagccaggctttgtgtatgccaggcaagcactctgctagctgagctacatcatcaactctgttaatttttgtgtgtttctgaggcagggtcttaccgtgtagctcaggttgaaagagcccaccatagctgcaggtcattgcatgaccaatttctctgttactttctgcttgtccccactgcaaagagctgggatgacagccgtggcactcacacctctgcaggccattttctaggtcatgtctgggtgtccatgcaggacttcagactgtgccttcttcctgtaccaagggcagtttgtgctccctggggaaacagcaggctatacctgttttctttttttttaagatatatttatttattttatgtatataagtaccctgttgtttcagacacaccagaagagggcatcagatcccattacagatggttgtgagctaccatgtggttgctgggaattgaactcaggacttctggaagagcagtcagtgctcttaacctctaagccatctctccagcccctatacctgttttcaagtagctttgtatgttcagtctctggccactggctgctttgattttataaactatactattgtggaaccccaagaatgtattttctcaggtcacaagcccatgtaactgcccagctctgccacgcctgggttctctttgcagcaagttaggatggaatgaaggcctcccagcctggggctcctgtaagtcccagcattcactgtctgcatgggaaaagatccattgtcctaccaataaacaggaggtatcatattgtctgccctgtagtgttgccctataggatgactgaatgaggagctcaaggccaggcatggtggcatatgtatactaccagtaatcccagccttagggagcagaggcagagcttgctgagaatttgagatcagcccaagctaagtttcgagtgctagatacacaccaagaagtctttgtctgaaaacacagtcttcagatgaaagtgctggatgcaaaacactgagtgagcagtgaatagtgaggagtgtggcctctcacaggagggtgagatggttttaggtattccagggacctgagactgcccttgtcctgatcctcctcccttgaggaaagtgttggaatgacaggcatgtgctactgtgtttcactgtggtctatttattagaatggattatacatacttttgtcatttacattttttcttttatgtcttttcacccctgccacctgttgagagctatagagctcctagaatccgccagtgaggggctggggacatagcttaggtagagctggcctagcatgtataaggccctaggatcaatcctgagtactatataacacaaaataagcgcttctcaaagattcaaaaatgtaaacaaaacaacaaagccactgtgcatgggtgtggtgtggacagtgtaacagagctgtcaggacagatggcattgggtatccttccttccactgtgtatgctgctctggctgcttcaagagctgcctcttctctcacagaaggggtgctgggattatagctgcccttacatagctttggagatcctaactcaggctctcttgcttgcctcctgagcatctcctcagccccagaggtccaagatctatctataactgaagctcagtttcagctgagcatgtaggaagtagatttggcaggacggtgtggaggcttgtaaggagcctgctcttggccaggcgctgccagggttggagctgctgggatgtgatccctagaccatcccctccaagggggtattgccattttctccagagctgtggtgttttgaagtttcttcagcagcagtgtgcaaaactgctccatgttctctccctgccgtctcacctagctgaaggaaaagtgaaggaacctcagggacctgcatgctatttgttatgttttgttttttaacatttatttattatatataagtacactgtagctgtcttcagacaccccagaagagggtgtcagatctcattatggatggttgtgagccaccatgtagttgctgggatttgaactcaggacctctggaagagcaatcagtgctcttaaccgctgagccatctcttcagccccgtatgctatggtttaagaagaaagtgtgggggnnnnnnnnnnnnnnnnnnnntgccctcttctggagtgtctgaagacagctacagtgtacttacatataataaataaataaatttaaaaaaaaataaaagaacaagaaagtgtggtgtcctgactgtgtcgtgggctgtggccatcttcatgccctgaagcctcttgccctcaaagccttgtcctttggtccctagacttgtgtgggtagtgtcaaatgtgggcaaacggagggctctgtctttgtatgggagttcaacttgggggccacagactgtatcatgagctagctgctattgcagtttttgttcatacctgtttcacagattggccaaggctgtagactgaggtttggatggtgtcacagtgaacacttagacagcctgcagctgtgacttcactgtccccaggaagaaatggtatgaaaggaagcatggttcatgtctgatgtttactctgtttcctcatctgtgttcacagcattctactcccctgcccctaggctccttcttaggatgcagtcagtcccagggttggaacagacttgagtgggcctggctgtggcagcctttctgaatgttgggccttgtttctcttgattgtggatctggcagttctgcttggtttaggttttgtctttagacatggaccatcagtatcataggcaggccaggctaaggaagtgtgtatttgtttttaaaagacagtctcgctggacgtggtggtgcacgcctttaatcccagcacttgggaggcagaggcaggcagatttctgagttcaaggccagcctggtctacagagtgagttccaggacagccagggctacacagagaaaccctgtctcgaaaacccccgcccccccccccaaaaaaagacagtcttattatatttggccctagatagcctggaaatcactgtgtagaccagtctggcctcagactcacagagatcctcctctctctgcctcctgagttctaggacttgaagacatgctccacagaccttaaggaagtgttgataaacctctcataatgactcagaaggtccctccatcccccacagctgtgtggactgcacccttctccttcatccccccacagctgtgtggacggcatctgtctccatctccccacagctgtgtggacggcatctgtctccatctccccacagctgtgtggatggcacccttctttaagttaccctactcactctcttcactcagccctggtgtgttttgtgatgggttcccaaggctggtatatttattgatcaagaacagattttctcctgtaagctctggtggttgggatggtcaagcaggatacccacatttaggcaggcagacagagtgggcaggacacatcctcccttgggaaatcacttccagggtgatagcagactgaagcttcaggttatggagcccttggttgaactggaaggtgccctttcccccactgctcactggggttggtgctccctgcatctgtgcttcagtcttccaaaagccccaacagagcaagctctttcatatagcggcttgcttgtttacctgctttatttttttgtttgagacagggtagcactaagtacccccagttgtcctgactcctcccttggctacccctcccccagggctggagaccaccttgttgcttagtagctaatgcactgcacttccccactgaggtggcttcctcccccagatgactcctacctccttataggggtgtcctctgttgaggccagtgagggagggaatgggataagtgggagcctgtgaactgaagcttggaatgagccagacacattctggctgattgtggggtgtccttgggcttcctgcacattgggagtggttgctttcagcacaaggctgtgtgtcctggaagacccctgcagcgtgagtctgtgtactgtctgctgttaggcagctgttagggggcctgaaaacagccaaatgcatgctggtgacccagggtcacatgctgacacttgcccaacacatggggcttggaaggaggcaaagaaagggggcctttcttctgccattgcctatcctatgtgagccctctgtcctggggatgcggggtgcacacatccttactagaaccggggcatattttggtgatggcaaaacattgtgtattgtcacctccacctaaggctaaggcaagagatcacttggcttgaggctgggtgtggcagttccttcctgtatatcagtatttgagagcctgaagctagaggatcactaggactttaaggccagccagggctatcttgcagtgccttgtcccaacaaaaatgaaacaaaacagcaaaagaccatcctagatagtacctgaagagaaagggccaggatgggagggtgcttctctgttggcaggccatacatatgtctgcttgtgagcactttgtgactcttctgttttgtttagattcccggtggaaatccgttatacgagtcttattacaagcaggtatgtctaagtgttatcttctttttcttttctgtgtaggtatatatgttcacctgtactatagcatgcctgtagaggtcaggggacaactcgtgggggtcagctttctcctttaaccatgtgggtcccagggatcaaactcaagccgtcaggcttggtggcaggcacctttgccaactgaccatttctccagcccatcactgcctttatatatgttgtgtatgtatgtactcctgtgtgtatgtatgtgttggtgttgtgggcaaaacccagagcctcttacatgcagaacagctcagccactgagttgcacctagccacacatctttgttgaagttgggcatgcatttaaagcagctttctgtgagtacacatggagatgttatttctaagtggatgcgtcgacttttgctgtccctttgtaggtggaccctgcctacacagggagagttggggcaagcgaggctgcgctgtttctgaagaaatcggggctctcagacatcatcctggggaaggtagggaagatgaagcatggcttcctgcatccttggaatgaaagcagctatgcaaatcttctctggggcaggaccaggacacccaagcctcttagctgtaactggtgggtgtgaagacaggcccctggatgaagctgttagatatgaccttccttgcctgtcctcacacttgggaggataaggcagaaggatcagcctggagtacatagtatgacctgtctttgcaaagataaaccaaagccacgatgccaggtatagggaatactccttcaatcccagcactctggaggcagagagtgatagattccttgagtttgagactagcctggtcagtctcaggtggtagtcacctcaaggcataggcagcagaccagaacagagggcttttggtatcttgatagctataggttcatgttgctgtgtagtgatctaaatcactacaccctggggagctaagtgggcacagggtattctttgagccctaccaccaaataaccctggcctggcagggctgttggctattggtcccagtgcccatgacagagaagtggttgataagactcctgttctgtgtgttgttggtgagcagtactcacactcacaggcacttttgtgtttccacagatatgggacttggcagaccccgaaggtaaagggttcttggacaaacaggtatatatgcacatgtggagcaggggagggggtgggaacccctgaggctggactagttgtgtgtttcttctactgtctgctatcacacatagctgccaggctcaagtgaggagttctcactgtggaatgcaggtctttaagtacacctaggcccctgactcagtggcatgcctttgactgtcttgtacctgtcttagtttctttacctattgctgtggtaaattgcctagacagaagcaacttggggaaagggtacctgtagctcacagttccagatacaacctactgcaagtgtgtgtgtgtgtgtgtatgttggggcagtcaaggcagtaggaacctgaagcagctgaccccatccagtcaggagcaggtaataaatgcatcaaaccagtgctcagcagctttttcctgttccctcagtccaggcctatcccaggggtgatgtggccatatgcaggttggcttcctcatctcaggcaacccaggaaaactcctcaaaagccagcctgtttgaaactgcccctcaattgagacttttattctaggtagctcccattgtgccaggtagactaagctaaacatcatcaggagagagagcaggttcagctgttacatagttcaggtcccagcactcatatttgtcagctcaagcatctgcaattccagtctcaaaagaatcgatgccctcttctgaccactcagaacatacatacacacctttaaacaaaaccaaaactgtaaatgattaaaacattttaaagaattaagataattaaatgaattgtacctgatacggtggtacacatctttaatcccaacagtcagtcagtggaggcagatgaatggatctctgtgagcatcaggccagccagggctacacagtgagactgtctcaaaacaaacaaacatacacacacccgacacacgcacaacacaggatgatgacacagcaacacagaaatgtgtgtgtgtgcatgcatgtggcccatatatgagtatactgtagctgtacagatggttgtatgccttcatgtggttgttgggtattgaatttaggacctctgctccctctggtcaaccccattcactccagtcggccctactggctcaggcccaaagatttatttattgttataaataagtacactgtagctgtcttcagactcatcagaagagggcgtcagagctcattaagggtggttgtgagccaccatgtggttgctggaatttgaactcaggaccttcagaagagcagtcagtgctcttacacactgagccatcttgccagcccttcaagacttaattcttaactagagagttcctgtgttaaattcctagcaaccaaatggtggctcataaccatctatggtggaatctgatgccttcttctgatatgcaggtatgtgtgcagacagaacacccatacattaaaaaaaaatagattaaaaaacacagcaaaactaactaaaaagaaaaagtaggtcagcaagacaattcctctggtgaaggtgtttgctgtcatgcccaacaacaacctgaacccaatccctagacccacatggtagaaagtgagagctaaattccccaagctctccgatttttacatgcacactggatgcacatgacccttccttcctaataaatacatgcggtttcatctcaaaaaaaagaaaaagttgtttaaatccaatacctgggctgcagtactgctttggaggaaagttcttgtttggaattcctaggctacatcctattcctggccccacagaaacagaaaacaaaataggataggtgtgtttgatccatcagtcattatgagtgtacgactgctccagcgtttcctgatctagaagctcattcattctctctgggaaagtcccttttcttgggcctcttcagtgctcagtgctcaccaatggccaccggctgtgcttcagtcagcacagtgggactgaggacctatgggctgcctgccttatggtgttgaagcctctttttgggtttacagggtttctatgttgcactgcgactggtggcctgtgcacagagtggccatgaagtcaccttgagcagtctgagcctcaccatgccaccaccaaaatttgtgagtactcatggtactgtgtgtgtgtacatacatgtgagtggcgtctccatgtcttctcttgtctttactgtgttttagtcaaggtgaaatgcacataaaagtttccattttaaaatgcacagttcacctaggttcacacacccttaatgagtgcacagttaggtgacagtgttgtgcaccatcatcctgagtccccgttctcacctcctaaaaggaaggccctggaccataccttaatctttgtttctctatcacccagtccttggcagccacccattatctttctgtgtagatttgtcttttggggacatttctcttaatggagtcatacaggatatgatcgccttgcatgtggcattttccctcagcctgtccacatcatagcctggatcaggcttttgttattgccatgaccaaggatacagctcatgtgtccacctttggctgtttggagccttgcattactaaacgatcatggatctgtgtgcatacctgtggctcacacctgggagggaagctgtgggatcatagggcacccccatttggtggccttcccactttgggataagatccttttgatcacatgtgcctttcttcctcagcatgataccagcagcccactgatggccacacagtcatctgcagagacccactgggctgtgcgggtaagtgaacggggacaagccattcatactattcagaatgttctggaatacgttttatttagcctttttatgtctccacagtattgaaggatcatatctgtgttttgattttattagttttttttctttttccaatttttttattaggtattttcttcatttacatttcaaatgctatcccgaaagtcccctatacctccccgctcccctacccacccagattttattagtttttggtttggtttggtttggtttttggtttttcgagacagggtttctctgtatagccctggctgtcctggagctcactctgtcctggaacccacgcccggctgattttattagtttttaagaatttattttatttaaattatttgtctacctatggtgggtctttgtgctcttggagaccagcagtggtgggattccctgcagctggttgttgggaactgcacttgggtgctcttaacctctgagccatctctccatcgctttaatttttgatttttttcttactgagaaatggtctcatgtcactcggactgatgtcaaactcagactatagctgaagctgctcttgactgctgaccctctgcttctacctctccagcacagagaaaatagctatgcctaaacttgacttggaaaattgcttctccagtctctttactgcatctcgcagctgagtcttggaacaaggagctaagggtttgaggttgcagttgaatccctgagctctcagcaagcatttgaggctgtgttgcttgtattggttcttccaagtagacaggagacacccagctcaggcagtcttccagccactcttccctctctgaggtgtccactgatctgcaaaaacccttgttcagcacctaaggtgttctcttccatgcataatgtgatgtggtcttgcctctaaggaaggaaaattagcaaacaaacgtggtggctgtcttagtcactgaagaagcacggcgacctcagcaaatcttttctttttttttttttttaagatttatttatttcatgtatgtgggtatactgttactgtcttcagaaggtgacattagatacccattagcgatggttgtgcgaaaccatgtggttgctgggaattgaactcaggacctctggaagagcagtcagtgctcttaactgctgggccatctctccagtctgaccttagctattcttaaaaatgaaagcatttaattggggctggcttatactttcagagatttagcccattattatcatggtgggaagcatgatggtgtgcaagcagacatgctggagagctaaagagaaagccactggacctggcttgggcttttgaaactacatagcccacccacaatgacacttcctccaacaaggccccacctaccccaacaggccttatctcctaatagtcactacctatgaacgtttgagggccgttttcattcaaaccaccatattccattctctggcccctaggcttatagccatatcataatgcaaaatgcatgcagtccaacttcaaaagttttcattgtctatcacagtctcaagccctgtttaaaagtccaaagtctcttctgagagtcatgcaatctctttaactgtaatgctctataaaaccaaaatgagaacatagatctcattttaccagcatacaatggcacgggatgtacattacctttccaaaagggaagaaaaggaatatagtgaggatatactggacagaagcaagactgaaaaccatcagggcaaactccaaactctgcatccatgtctgatagcaaagtgcttttcagtgctctaatctgtcctgctttggtgcctgcagcaagtttctttctcgtgagctggttctactctctgttgaaactatatcccatgtctctggcatctgcaacattttgaggtctcgaaggcaatccaaacttcactttcagagcttcacacagtggtttctgtgggcttcatgtagggacccccctactacctgccgggcctcagtggctttccttagtcgtggagggggattctataacccttttcttgtatcttttcctctaaagccagaaccacatagccaaagctgccaagttctgcttcttaacctgggctggaacatggcctcctcattcagttacatctttagcagctttctgtttttgatggtttccttcactgcctaagcttggttgtcctgggattttctctgtagtccgggctggtcttgaactcagagatgtgcctgcccctgcctctgagtgctgggattatgggcagcactaccatgcctaactctaaacttttttaaaatttcttttcagaagttagaagcttaactggatgaggtcttgccctttagtcttggtaggcacgagactccgctccatcacacttcttgcaacttctctcctcaggctctaccttttgtatttttccttgctcagcttgctctttttttacaatagatgatatctctgggaggcctgccctttctgaagggaaatggaggaggagtggatgcggatgggggaaggattagaatgagaagggggaggggaaactgcatggacatgtaatatataagagtttaaaaacaaaaaaacaaaaaacaaaaaaaaccaccaggacagagtcaataatactaggctgccctggcatttcctctgccaaccctgttaatcccaaactttttaatttagcttcaggcaaatttttcagagaagggccactttttttttttttttttttttttttttggtcacattattactctttttccacagttcacatcaccctcagcactgtcttctatgctcctactaggatgatccattaatcccccacttaagtcattctactactttcctaatccagagttccaaagctcacgtgcagcaataagcagcaggtgaggacttcacagcagtatcccagttcctgataccaacttctgtctcagtcgctgttttatcacagtggcacgagcttgtctccacaacacttgggaacttgaggatggaggacagatcacatattcaaggccagcatgggtcatgtagggaagaacctgtctcaaaaacaaaaaaagatgggctggctgccaagtgtggtgatcctgaattcacataacgaaggagagagctgtcctctgattgccacacaagtaccatggtgtgggtgctcccacttaaatgtgtataagtaagttaaaactagagatacatgactataaaacctgtgactcctgagccagagttgaactacaagtgtgggctgtggatgctttcagaatggcagtagccccaccctcatggctcatgttctcccttttttcttgatcctgttaggcacctcttggacagctttgagcttctttgttttctttctttctttttttttttcgagacagagtttctctgtatagccctggctgtcctggaactcagctggcctcgaactcagaaatccgcctgcctctgcctcccgagtgctgggattaaaggtgtgcgccaccacgcctttgagcttcttaggcaagggctttgccaccaagctacatccttagcccattagtttgtttttctgagttagggtctcatgtattcaaacttgctgtgcagccaagaatgatcttgaattcctagtcctcctgcttccaccttgaattgagtgctggaatcacaggtgaattatatgtgctgcggatggagtccagggctttttgtgcatgcttcatgagcactccacccaccaagccacagcactagcactcttttccaaacctttttttttttgggtggtgaggttggcactcaaacctttactgcattgagccccatcacagcttgtgtttgcaaaatgaaaagcaaaatgttggcactgagatttacatctgagacaggatctccccatataacagaggctggcttcaagccctctatcttcctaggtctgtcttggtgctggaatgagaggctgtgccattggttccactagaggctgactttggtcatgttcattccagaggggaaacatcaccctgctggcctctgctccccatgacccccagactcaaagtgccagggagcttttcctcccaagccataaattaaattctccctggaaacccagacatcttgctctcaccaagtaggcagacctggctatggatccacactacttgctcttactcagtctggcttctttcctggtaggtggaggagaaggcaaagtttgatggcatctttgaaagccttctaccagtcaatgggctactctctggagacaaggtcaagccggtcctcatgaactcgaaactacctctggatgtgctgggcagggtaaggtactgggctgggtgttttcccatcctgcactgcagtatgcttgactgttaacaatcactattctcccaccatcatgcactgtacaccggatgctccctgtatgtcaagactgctcttctgccccgggaagatgctggcacccttccattttataatgggaggtacaggcagagggagaaggttacatggacctgtaaccagagagcctgcgctgagcctagcaggaatccttcttttcttttgtctatttgtttctttctacttgtttgtttgtttgtttgtttgtttgtttgtttgtttttaaaaagtgtcttcacaggagtgtgtatatatgtgaggttcagaggacaatcttggaagcattcctaaactgctatctacttttttgtagattgggtctttcagtgggcctagaattaactaagttgctgagctgggctgactggccagagaatccaggcatgatcctgtctctgccttcccagcactgggtttacaagtgcatgccaccacatccagctttaaaaaataattacattgaaatttctttttttctttcttcagtttcacaatggagccctggctggcttggaactctttgtgtagatagtattggtcttgaattcataaaaatctgctaactatacttcctcagtactgggattaaaggagtgtgccaccatgctgcctacatttaaaaacttagtgtgtagatgtgcacagtatgtgtacaccactgtgtatctatgaaggtcattggacagcttgcatgatctggttgtctctatgaggggatcaaactcaccttttcaggcttcccagcaggcatctttacctgctgagccattccattggccttgctttctctttttaaggaaatgctttttcctgcctgtcagtctggaggttaaggcactttcaactcacaggtttagaaatagtcttagatatttcattttgggttttatcattttgagatgggatctcttgccttccatattggctgggtgtaaccttaaactcctgatctacctccatagtacatttctttatttatgttaaagcctcagttttagtgggtgtgcagtgcacaccataatcccaaaaggctgaggcaggaggagcatgagtttgaggccagcctggttggctggatcctgtattgggaatcccttatcaaaaatgaacttcaaatttgttcttatgaatgtgaagtgtttggcttcaggtccctactgcgggctctgttcttctagagggtcatggctgcacccaaggcatcatcctggcagtttgctttatggtatatgtgggtcaggcaagcttgtcatctgtggggcgttgctacagagggactgaggtctttcagaggctcctaaactctagtagagcctaaaagcaacaaacactggtcctcagtggctctgagactgtctcttaatgcccactagatgtgcctttgtcttccaagttctagaactatgggcagaacctgttcagttacatttcaaaagactttaaagtctgtgatattggggctgggtcttagggcttatgacctgcagaggacccaggtttgagtcaaatttcagttgaaagggttgcctaggaattgagcatgctgtaggaagggtgcagatctcgaccttgatcttcagcactccatcagagcatggttttcagagagatgtagggttaggctgctgttttggtttcttgttttgatagttttaggtagggtcttagttactgttctgttgctgtgaagagacttcatgaacaaagcagctcttataataaagcatttaattggagacttgtgtacagtttcggaggtttagtccattgtcatcatggtggaaagcatggcagcaggcaatcagataaagtgctgaagcagtagctgagagatatatcctgatccataggcagagaggcagggaaagacctggcatgagcttttgaaacctcaaagcctaagtttgcaaatactaacggcattcccacccagcccaccacagataggatcttgctatatagccaagacagccaagaactctctgtagcccaggctggccttgagcttccaatcctcttgcctcaacctcacagactagtttttaaatgcttcttcttttcttctcttttcttttcttttcttttcttttcttttcttctcttttcttctcttttcttctcttttcttctcttttcttctcttttcttcccttttctttgtgtgtgatgtgtgtgtatgtgtgtgtgctttgtgtatgttcacttgtgtgggtatgttagaagacaggtatagagctccctaatggccagtgattgccttggtctcatgcttgtgctgggtgagccttaaagctcttccttctcacatcactctcctggatctgtctgtcccctttaggtctgggacctcagtgacatagacaaggatggacatttggaccgagatgagtttgctgtggtaagtcctctgtgtcttgtccccaccttgctgagacctaaggaagtgcccacattggttggtgctgcagtcttgtgttaaagtgtttatttttacatcttcccagtacttaaaaaggttcaggagtactcgagagttcagactcttttatccagtgtgattaccttacaatgcctgtttcgccctcctttctctctgtctttgtgggctagcctggagcttgctctatagaccaggctggcctcgaattcagagatctacctgcctctgcctcctgggtgctgggattaaaggcatgtgccaccactgccccgcctatttttgtttttttgagacagtctcaggtaattgaagctgatatttttgtttgtttgttctattctgttttttggtttttttttttttttttttttttttttttttttttttttttttttttttttttgagacagggtttctctttggagaccaggctggcctcaaactcagagctctgtctgcctgtctcttgagtcctgggattaaacaattaaagcctttagccatcactgcctccttgaagctggtcttggactcttgattctcctttctctatctctcaagttctagcattgtaaatgtgtacagcacctgactttccagttacattttaaaatagactttaaaatctgtgagattggggctggagaaatgtcttcggtactgcagacctggtgttgcaggcctcttgcaaacccagctgaggtataaataagacatggagacgtttatgtggtttacagctttgggccttttgctggggcagtctctagccacttaatctaaccttgtatcgctgagacccaccctgtagacccacctcttttacctccctgccccactccagtccatgtctgttcccttcctgtccttttcagttttcctgctgccgccgccagtatctctcctgctatctatcctgcggctccctctccacctacaactcctgccctagctattgtctgtcagctcattattgcaaccaatcagcaatgagacaacatttccaaatttcttagatcagtcgcctttaggcaatggggagctttcctgaccttcatgttttgggcagatgggaagggactaacatacaaattagaagcagatgatgggccaagtttttatgataatgccaaaatcctgccagcatttagctctcacagtaatcaacagttgaaaatacagagacacatcttactacagtgtgaatacccaagttgattcccagcttccatttgtgacttggtggctcacagtggtctgtaactccagctccaggggatttgatgcactcttttggccttcatggacactgtacacataaaatgtccagacacagataggcaaaatactcatagatatgaaaattacccttcaaaagctgtgatttttgccagtgtgcctatcatcccaggactcagaaggctaaggcaggaggattgggattcaggtccagcctcaactttataccatgactttgcctcagaataaataaatacatagacatgacttagaccatctctctcctcttgcagtgcagtagctccctgctgtctcacactgtcccctctaggggcatactgtgtctcctcttggtgtcagtgcacctccagacttcagaactttggaaatcataagctttgaggctggtggtcaacctgcctgctgaggggaggtataggtgcctagagactcaagcaaatctgttacatatgtgagcttcacttttccctgtgtgtctttagttgttacagctttgattggtaataaagtagtaatgattgtagtgaggtaattaaaacaaagactgggctgtttactgagtagagtgcttgccaagcatgccaaaatcctgtggacacagcaggaaggtcaggagtccaagggcatcttcagctacttggtgagtgtgaggctatcctgggaaacttgagatacctgtctcacactagtcatggcagtgcactctagtagaagtgctaggaatgtgtatttttgtttccggaattttctacataacttttgcagaccacaggtaactctgatcttaggatggaacagacagtggctgtgtgctgtgtctggatggctgtcttctgtgttcactcagctgcccaaattggacatgtcttgaagatgcagaggaggctgatgagagagaaaagatgagcagcttccttagagcctctaggaatccccatggctcccagactgcatgaggcgctctttgtgttctgggccaacccccccagtgcctttttcttctcattgacaccacaggctatgcacttggtgtaccgcgccctggagaaggaaccagtgccctccatcctgcccccgcccctcatcccaccctctaagaggaagaagactgtgtttgcaggagctgtgcctgtcctgcctgctagtcccccacccaaagacagcctccgctccacaccatcccacggcagcgtaagcagcctcaacagcacaggcagcctgtccccgaagcacagcgtcaagcaggtcagtgcccaaggcctcttgtatatcatttctcatcagcaataaagagaaagctttgatcaaatttttttaaaaccttactagaggtgtggggctggagagatggcttagtgattaaagagtactgaatgctcttccagaggaccaggttcaattcccagcactcacatggcagctcgcagcagtctgtacttgagcatgtggtgcatagatgaatgcaggcaaaacaccaatacgcattaaataaataaacaaacaagaaagaaccttaaaaaatgagtatggttcagaatgagcttgctttcaggtaagtggaattgttccctggtgtacgtgggcctggacagtgctctctagtgctcaagtcctcattgaagtgatccagtgtcttcacagaacctgtgcttgcttgtggactcaccttactgacaacagactctttcatctgtttatctgtttatatgcatgcatttgtgtaagtatgtgcacacatctttatttggagtccactgaggatatcagatgtcctcctccatcactgtctctccattcctttgaggcaaggtctcttgatctctggggctcttctttctttcctagctgggctggtagcctgcatacctgagtggtctccctgactctgtctcttggtacaggagttgtaggcacttgcaggatgtcctgcttgtttgttacgtggttctagaatcagcactcctgtcctcatgtttatgcatcaagcagtcttaaacactgaagaagctcccagccctagcccctgttttctaactgctttcagtgccctaagactgaatgaaaggatgaggtttttctactgtaaggtgttgcattgcctgctgttttgctttgtttacattgactgcttgagcacacatgggtgggtacatgccacagcagttatgtgtggcctgagttcagtacagcaccttctaaccacaggcctgccctctcactcatcacacatcagtgtgcctggctccggcactgggacaagagcttattttgttggtacagtacctaggactttctatgaagaacatttggacgctggaaaggctgtcctggcagaggacattatttccctgtcccatgagcatttgtgacaaagaaataatgtactgcacagagctgtaacattgagtcgggcattcttagtcatgttaagatggggaaagtgcttgggaggatatgctcagggtctgtgtacacgtaagaaagtgctgagagctttggtgtccatgaaggctcagtagctagcatgtactgacatgcctcttgagcccaaagagactgcatagggaatggctgtgcagcatagagaagtcagtagcagataaatgtatcccatgctcattaagactgggtcttgctagctacttgctactggtggcgcacgcctttaatcccagcacttgggaggcagaggcaggcagatttctgagttcaaggccagtctggagttccaggacagccaggactacacagaaaaactctttgtctcgaaaacaccaaaaagactgggtcttgttatagttccaggctggtcatgaactcctaatattcctgtctcagactcaccagagctgagggataatcatatagtgaaaataaacaacaaaaaatggaaactggtcagcagctgcagtttcttcctggatgtttctatcctgagactatctccatatgctattgttctgggtttacaggaagcagaaatggtagcagcagagatcccccactgacccgaacttcactgtatgtgtgtatgtttatctgacctttttttattctctctgctcctagccagggtcctggactgggctgtatggtcctgacactgtcagtgagaagtataagcagagctgagactgggacagggctcacaaataagtcactctgttgtaacctgtttcagccaccagtggcctgggttgtgcctgtggcagataagatgcgctttgatgagatctttttgaagacagacctggaccttgatggctatgtgagtggccaggaagttaaggagatcttcatgcactcaggcctcactcagaaccttctggcacacatctggtaatgatggaaacattggtggaggtgctctgagaggctgggaaagagggtggggagggctcccgttttccaggtgacagtatacagggaggtagggtcagcccttatctgatactggagagctgtgttgaaaatagtcttctccacaagccttaccttgtcacagccacctgtaacggttactctgcctgccacttgagtaacctcaacaaggaccttgacagttccagtgaggtcccacttggacatgggcattccaagtacattgcactgaagtcgagtgggtcaccagagtgtgattttgtggggggcaactgcattgccagtaaatgtcagccagatgtgctggtgaccccacagctggtcctcttccacattctgtggaccctggtacctcttgagacccaaggccacatgagattaaatcagaatgacataaaggggttgggaggtgtaggtgagggtccaactcctactctcctatggaggatagttttagttaggctttctatttctgtgatagaacaccatgacccaaaacaatgtggaaacggcttgtttctgtttacatttccagatcacagtgtcaggcaggaacctggaggcaagagcagaagcagaggtcatggaggagtgctgcttactggcttgttccccatggtttgcttagtctccttatacaactcaggaccacctacccagggttggcaccacccacaatgaaatttccaaccccaccaatcattaatgaggaaaatgcccccacagagctgcctacaagtcaatctgatgaaggcattgtctcaagagtccctcttcctagatatctctaggttgtataaagtttacaaagccagctagcacagggacagtcatcagctattaggttgattttcggggttctcttgcaagttgttacagctgttctagtgtagatggtggccactgaataacaaacacttggtgctggatgagggatctgccttcatcctacccctgttaagtgctggacagagctgacatctcagagcgaggattcttctgaacgtaactggtgtggtccagtaagttagcttgttccaaaccagagccttgagtagcttcctggctgctttctgactggatcagggaactgagttggtcacctgaaagaaccatcttgagtaaccctagccaggtagggaggagagccagcaccaagggtcaggggacactcagttgcctctttagccagcctgcctgcttctttagagcttactgttgcactcaagtggagaagcctcagcagcctaagcctgctttgcgtttatgctctgcaggtagctgctgtagagtgggcccatgaaggccttgtgcccacctctggcaagtgactgtacttttaaccagcagtcaaaagtgcttgccctcaccaggccatgcagtgccatctcatctaggatacttctgttctccctggttccacacaagacacaggcccaaggcaagctcctgctgtcgaagactctgtggtcagggagggtgtcttgagacctccagagtgcagctctcactggagaccatgcacagcctcaacaggaatgagaatgtagccctgccccatctgcccaaggactcatggtctgtgctggccacttgcatctctggagtaccttgaacaaaatgaaccaagaaagccttgaccctcacagtcaactaaaggggtgtgtgttgtggggaggtgttcttcctgaaagcaggttctgtaggccagagcattgctcccatgcactcgtgaccatccttaaggaagtgctcatcagcattgatgggaacatggaggcagtgcccggggcttgctgtggtcctggtgggcttgataatcggggagggctcagaataggtggcaagtgcaactgtgatgtgtaattgcatcccacatctctcccagggccctggctgatacaagacaaacgggcaagttaagcaaagagcagttcgcactagctatgtatttcattcagcagaaggtcagtaaaggcatcgaccctcctcaagtcctctcgcctgacatggtgccaccctctgagagaggcactcccattccagtgagtagccaggcatccttgtttctgttcttcccaccacccaccagaaggtggtgctcatgccccaagacacccccccacccccaccccaccgccctcccttccccccagtcctcagtctccaggccacgtttgggggtgggactaaggggatggggatcctttgattgggccacctggagtgttctcaagtcagtggccagtgctttggtcccactgacatgtaagctacttggctccctgtgacatttcaagttttaattctaggacagttcaagtactctggcatcaggagagttcactggtgttaaagagctggatgacattagccaggagatcgcacagttgcagaggtatgtggctgcctactttttggtgagtcccgatgcagcagtcttatgtccgtttacccataagcctttgaaggaggggaggacacaagtcttctcagatctatttctgcttgaatcattgatgctctgagtctatattattcaggtagcctcagtcaggttgtggctacatagttgcctagggatacaaacagccgagatgagagtctagcacacagcttaggtgacagacttaagtctggcacacctgctgtacacagtggagcagttcctcattgcccttttaccagaagccagcgactgtcatatcactccatgcactccccctggctcccctagcccagctttgctttctattcttgtccttcaggaaattcttcacaacatatctttgattcccacagtacctcctcatagcccactgtccctgcagtactggatggtgttcatctgcaattctttgtcccctgtgcccctctttgttgagtggcccatcagtgtcagactactgagtgcctttgattggatgtgggatataggaagtggtttctcttagtgtgacagtcacagaactaagtagtttggtgacatgagtatagtagctcatagggagggtgtgcaggtgcctgtgccagctgtccgctggtgttggagcccaaggagaaggtatatgcctggacttctcgctaggtccttgctgctctggattcaagctctccatttccttgctgacttgtcagctgggagccccttgctaatgctggggaccactcctactccaccctgtctgcctcctgaacttccagagtttttcatccattgtttttaaacctgcagagagaaatactcattggaacaagacatcagagaaaaggaagaggcaatcagacagaaaaccagcgaagtacaggtgtggatgctgtgcctcagctcaggcctgctgaatgtaggaaaaagtcagaattgtgtgctgaatatatgacaatgctttgggatttcgatgtgtttttgtttccttggtgacattggggatggaacctgggatttcactcatagctggtaggcagcgagtataaaactccaagcctagtctgtgcccaggtgccagaagtagaccctagggccttatactcatccttgacaggcacagggacggaggccctccccacatagtgtctaaggctgaaccacagtccagcccagggtctgctttaacctcttatctgggaactgttgttaccagtgccagtcaataccacccatttccataggaattacaaaatgacctagaccgggaaactagtagtctgcaggagcttgaggctcagaaacaggatgcccaggaccgcctggatgagatggaccagcagaaggctaagctgcgggacatgctgagtgacgtgcggcagaaatgccaggatgagacccagacagtgagttcacggtgtggccagtgtccccgagcttccctgacagctcttgccagcagatgacagaatgccagctgagaaatatctaggcacctgaggcctgatctgtgaacaatccttctgttcctagggatcaggttgcaaaactgcatggcttcagtaactatgccgtggatgtcctacaacagggaacagggctgcagatgcctctgcctcctgctgtgaccccttttatcacatattatctgctttctctaactgcaggtcctgtacactgatctctggctatgcagactccttatgctttatacttattcattcgtgtgtgtgtgtgtgtgtgtgtgtgtgtgtgtgtgtgtgtgagagagagagagagagagagagagagagagagagagagagagagagagagagagagagagagaatttgtggatatatttgtgtgtgatcagaggacagcagggagattttggtctggcacattatccaccagctatatctctagctccacacacagtgagaaagaaagcttggtgtctttctgtctttctgtgtcctgacttgtaagtccttttggctctcacttcagatctcatcattgaaaacccagattcagtctcaggagtcagacttgaagtcccaggaggatgacctgaacagggccaagtcagagctgaatcggctgcagcaagaggagacacagctggagcagagcatccaggctggacgtgcacagctggagaccatcctcaggtccctgaagtgcacacaggatgacatcaaccaggtacttttacagggatgggtcagtggtactgtgaggttagctgctgaggactttgtagggtgtgactcgaagtgcctgcctccctgtcccatgagcgctggccctttccagaaagccaggaggaagctctgagcctgccctgtccttgtgcatatgttggtcactggtttttgtgtggtctctgggatgtaggctacagacagtgtgatgcccttagcatacagcaaagaaacctgtgtcctatagactgaaactatctgcttgtcttcaggctacaggctgacagggcaatgtggatgcctctttgatctcagtggtcatgtcttacattgtgttttataaacgttatttccaaggggttattttcagggttcttcctcccagccttcagagactgttcttggagatggcctaacatacattgctaatagaaggaatggttggtggtggttaacagaggatctcaactgggtggcctctacaggtctggaactcactgtagaccaggctgtccttgaactcacagagatccacctgcctctgcctcctgagtgctgggattaaaggcacatatgaccatgaccagcacattatttttgttgttggtttggttcggtttcaggttttttggattttgggtttttgtttttttttgttgttgttttgttttgaactgtgcttgagatagctcacatcagccttgaacttgtgatcagtcttcctgcctcagccttcctaggccgccttcttccttcctatcttttgtcagtcctgcaggtactgtatatacagaatttctttatgacatgagatcctttcacaggaccagtgcctcttgtctagtgatacagcttgggcagggcagtccttccctatgtgtatgatccctcagggaaggcatcttgctggctgcacctggagctcctttgatgttcatggtgtttgtcttgcaggcaagaagcaagctgtcccagctacaggagagccacctagaagctcaccggagcctggaacagtatgaccaggtgcctgatggggtctctggtaccagcctgcctgacctggccaccttgaacgaaggcatcttgctggcagagaggggcggctttggagctatggtaaaggtcgagtaagagtctccgggtccacgagggctctgctgcaactgtagatctgctcacaacactggctccctcaatgtgtccctttgtttttgctagttgtctgcctgcccaggtcccagggctggtggccgagttcctctgtcatctagaagctgtgaggcccaggtgtttcatctcctcagaagtgtttcttttgggccagtcacccaaatgtggagggcaaacctaaccaaagccagtttggtcccatgctgtgggagctcggtgctctactgatacagccttgggtgcaagtatgtgtcgttcaagtcaagtgattctgaaagatggagaaacaggctccagctgcagcttggtagtaagcactgcaggctcccagttccatcactaagcaccacagcacatctgctctccaggttctgtgcagccagctgttggctggcctctgggaggaagaacctcagcactgtgtggccacactgctcgtgagccattgatgctccatgcgacccttctctaaggttgtcagtgcccttgttggagtcatcagccccaactcagggagggatgtctctgtggccataatccggggtattatgtatgctactttaacctctcggccgcctcatcttccagggctctcgttgctccagccctgctgcttttcctctttgtaccttccctcttgtggtcgccactcgccttgcactctaaacacagctaccttccctctctcttctcttctctttctcatccaagaactcacagagaagcctgttctttccttggaccacttagaaggtgctgtttatatttctgcctgtccctcatgtctgcccacctggagttccccttcactcttagacttataagtaggtggcttcctgcccacagtgggcatctgttccatggaattcccatggaattccttgctttttggcctgtagccagtgtgtgtttctgtcttcttactgtagtctttgctttggctccatctcaccattgtcccctgtgcagctggcttgtcctatgtcctgggccagggaaatgctccctctaagtctccccttgtggattgtttggtgttttctttctttctctctctttctctctttctctctctctctctctctatatatatatatatatatgtctgtctgtctgtctgtctgtattctttctttgcttctcctctttttctttctgcaacagtgtcactgtgcaacccaggctgtgatggaactccagagatccctgttgcagggattaaaggtgtctatcaggttcccctgtagcttttatcacatcctgggctgcatcttagcagttggtgacagtttacaggtggtggtcatttctgtcactaccagaacattttgtacatggttatttttgtccatcgtttaaccagttggagtttgagtggtaaactgtcatttgtacagtgtaaccataagatatattacctagaaacttaagacttgtgtccaaaggaacccacatcttgtatttttaaaaaaatgggggggggcagttgtttccatttcttaataaacagtttgaagcgaggtctttgttcagtgttccatctggggctgtggagcaaagaatgctccgtccgttctcttcatggtgtgcagctaggaactgtgcttaccagaattgtgcagccaaagtggcacctctggaacttactacaggtgactcttgagccactgagctaaatgttaagttcccaaggtacaactgcccaagttcccaaggtacaactgcccaagaggcaataggattcttataggccatgttcacttccgtgtatatccttaattacttttttcttttacagtgctgtagggggaacctgaggcctcacacatgttagctaggactcaccactgacctttgctcccagcccaaaatcatgtttatttcttgtgactgatagaagcctcttcctacccaggaagcctacacagcagagagaaagccgtgcaccatcccagcttatcactctgacttaccaggacagattagatacttgaccacttctagttccagtagcatggaagagccaaggttatgggctcccagcaagcatttgtaaatgagagcctcttagctggcagcttgagctaggacaaaaatttacttcaggacaattggtgggagcaccagcattgggcctctacacaacacagttcattttgattatgtttttgagacaaggtctcatggtgtagccatagctgtcctggaactcgtaaatgaagactagactgcccttgggcttacagagatctatctggctctgtctccaagtgcagagatgaaaaggcatgcatcccatgaccaactcccagcactctgtaaaagccaggaatgtcacagaaacttcttgagtatcctttgtggccatgtctatattctgaaaacaggcagagcttaggactagctgttttgcctttgaaaatgttttctgtagctgggtgtggcacagcagtgggaggccctgggtcctgtccttcatgcaatacaagttaataattaaataaaagtagttgctgggcggtggtggcgcgtgcctttaatcccagcacttgggaggcagaggcgggtggatttctaagttcgaggccagcctggtctacaaagtgagttccaggacagccagggctacacagagaaacactgtctgggggggaaaaaaagtagttaacatgttctacctctatgatggtactcattgctcgccctagtgtaatatctccccttataccatgctcagtcaccgagcaaccacgtgattcagtgcactaaaaagatgccatctactagtaacattgtaggttataagttcatcaacttgtctgcatggtgacagaatgggtcttctgtgctgaagaaccataggcctatacttaacccttatatttctgtcccctagggtgatatgttcttcattttcctggctggtggctgactgtattcatgtttggagggcagggggctcttttcagcttcaagtctggcacaggctgtccccttttttccttacttctaatgtgagtcctgccagggccttggctgcagtgctgagctgcgtgcatgcttagtcagtctttgccactcagctacacccagctattttatggccccttaggggaaggagccacagctgcatgaaatgtagatttctcctgacgttatggtgtaggccctaacattccacgtactggactggtagtatagttcccagacacatttgtgctattgaaatctatttactcactgtcttcccctcagtgatagaaacaccagattgtcagtaaactggccctgtccatcaacagccctttagtgctcactgtgagcttcctttctaagactgagctgttgtggctaactccatccttcttcccgctatctttagaacacagtccattccttgcccagggctagtacaagaaggttgtcttttgcctggcccagggtttccttaggtcataaccttcttccagtgtctctctgttcttgaaccccgacagctgtgtgtgcttcctttgtccacagtatggcagaaggggttatttcctgccccagtgcatgggcttcctttggtcagattctcccattgaggttctccctgtccttgaactccagcagctgcactagggtgtgtccatctcgggcctggccgtacccaagcgtcgtcagcagctgctgtgctagctgcatctgtgtttaacctccctgagcaccaggcctggcttccctaggaaggcctgtgcccagaagctctgaagaattggttccaggtaagaagatggcccacccacttcttcatttactcacagcccaagtcagtgactactgcttattattatttttttaatctttatttttttcatttcctgagaatgactcttgctgtgtggctatgctggccaggacctattgatcctcctgccttgggcttcccagaaccagagtagcaagtgtgcttcctgttcccatctggtggcttcctcttaacacttcttcccctgcccccaggtttcatagaattttggacttatttttgggtttaatagccttttagagtattcatgtcatttttctgaacctttgtctactttcacagatgccccagctttgacatgacttgatcattgagctcctgcctttaaaaacaaacacacacacagttaaatagcccagttttgtggaggattgtgtctcttaagcagaacagatccctgatttctcagcccatcattctgtttgcagggttcacccacccctcaggtcattcccactatggaaaagcactcttcaaaaatgttgtggatttttttttcctactgctttgagtacacttgccagcttctagaactgagtacctttatgcaaacatgcagagtgtcttgcatgctttagcagctcccactacaccagtgtcaccttaagccccacttcctacttgggcagaaacggcccacttggttttttacatagaaccgtggggtgggggttgctcccagcccttggctaggctctggccccatcattctgcctctgtgaacgtggcgacctaagggtgtgcgcgggaccacaccacgtctatcgctgtcactgacctcttatttcacttagctgcaaatccttaaagcttctccatttacagtagagtgtccttccttttcagggctgagtattatttcacttcacgggtgggtaggttccatctatctacttattcattccgctcagagacttgattagagtcactttagatttcctgaaaaattgcaaagctgtgatgcttgtctccatgtgccatgcctggtctccacttttaccttagcaaatagaccaatgtccaggcttgtttgtagccaaaatctccacctgggtgactccccttcagatactgttctgggtcacattgcaaacagtgcagatctgagttaggtgtgaaatcctgcactttgcttaaatcagaaataactcagcacctgtcctttcctcaccatcctaggatgatcctttcaaaaacaaagccttattgtttagcaacaactcccaggaacttcatccagaccccttccaggctgaggaccccttcaagtccgacccatttaaaggagctgaccccttcaaaggtacaccccagccaatgtccccataaaaaagactgttgtttctttttaagatttttttatgcatatgagtgttttgtctgcatgcatattcatcatctgtgtacagttcccccagaggacaaaagagggtgtcagatcctccagaactggagttaatgtggacaatttgttaactaccatgtggctgctgggaattgaacctaagtcctaagcagaatgcacttaactgctgagccacctctccatccccttaactttcagaggttgttttgttttgagacagagtagccctgcctgtcctagaacttactctgtagatcactctggtcttgaactcagagattctcctgcttctgcctcctgagtacatgcctgggaagcttttagatgttgatagtagcatcttaggtgtaagggacagatccagcactttggcatcattgtaggtcatcatgacatgaccaggagagctactgtgtctgtcctcttctgagtaaggtaggaggaggtaaggggatccagagtggggaaagaaaagtgagttctctaaggctagttctatctgctgccagccaagcatcccagctcaccttgactgcctgcctgggctgctgcttttcaccatgaccatgctatagcagcatcaagtgcaagaagacagactagttgtttcccctgagccagacaaaaggcctgcctctgctttcctccctcccctcacctgactgcttctctctttgctccaggtgatcctttccaaagtgatcccttctcagagcagcagacagcagctacaggtaaaggctggcttccacaggtaaaggctggcttccttgagttcctgacaatgtccagagtctctccatgctcagtttatttggggacaggatcacttgtgccctagctgtctatattgagtatgtggtgtgactgtcacacatggtgggactccccaccacccatgcccgggacagtgatgtcatagcaatagacagccatgataaaggcctttatttgtgacctttttttttttttttaaagatttatttatttattatatgtaagtacactgtagctgtcttcagacactccagaagagggagtcagatcttgttacagatggttgtgagccaccatgtggttgctgggatttgaactccgggccttcggaagagcagtcgggtgctcttacccactgagccatctcaccagccctttttgtgacctttattcttccgttttagattgcctagtatgtccaaagacctgggttccccagtaccacagaaacaaaggatttggaatatttgcctccccacagagatccccacctgtcacagtagcttctaccctactcattgcctgatgacagcagtgtttcctgccctggcatcacccacagtggttattatttttacatgcagctttatttcagagcataatgtatataccacaaaattcttctttaaaaaaagtttgtaccctgagcatggtgtcagacaccttcaatcccagcactcagtaactcagtagacagagtcgtatctgaagaaaccctaattattagcatgtgtgtgcatgtgtatatgtgtgtgtgtaaatatgtgtgtgtgtgttgtgtgtgtgtgtgtgtgtgtgtgtgtgtgtgtgtgtgtgtgtgtgtgtccgtgtatggaagttaggaacaacttacaggagtcagttatctttcaccatatggatcagactatcagggtttacagcaaatgcttatatccgctttgccatccctcttgccctagtaaagcttttgacagatgtatagaattgtggaaggttggagtgcaatccatcgccctgaaagggtctcctaacctgtggccattgtccccattctgactcctggacaactgaccacacagtcaccacaatttctgcctcatcctgagccctctctcctgttgctatctcctcacgtctccctggtgccattggtcaccagttgtgccctctttttccagacccatttggaggggatcctttcaaagaaagtgacccattccacagctcaagcagtgatgacttcttcaagaaacagacaaagaatgacccatttacctcagaccccttcacaaagaacccttccttaccttcaaaggtgagtggtttctgcagggcctctgcagtgtgttgggatcggttcatggtgtcggggaggctggctggcttggccaggagctgtcataacaagcctggtctcattcctggctggtaaggtggcacccagcactgtcactgagccagtgtacatagtgccaagtcagaccagggcatcttctcacagcccttgtcccttccagtctctcttcgtgctatggttctctgctcccaccactactccatctcctacagctatagcagaataccacatgtagctgggcatggtagccacacctattgtcctgggcagcacagtaaggctctgtgtcacacagactgtattattttgttttatagtttaaagcatatgtgtgtgtgtgtgtgtgtgtgtgtgtgtgtgtatgagagatacttcattgtttatatatatttatatatgtgtgtgtatgcatatgtgtgtgtatatatatatacatatatatatatatacacatacatacacacgcacacatatatatatacacacatacatacatatatatatatatgctttattgtgtgtgcctacatgaattcatatgcaccacatgtgtaggtgctctgggaggctagaagacatcagaccctctaacacagaagttcagtttgttgtgaattgcctgacacagatgttgggaaccagactctgcaagagcatcaagtatttttaaccactgaagtgtctacagcccatgagtgcatgcgtgggtgcacgcatgccagagaacaagttaatgtcagaggacaacatacattgatgtttccttctaccaagtaggttcttgggaatcaaacttagattgtcaggcttggtagcaagcatgtttacttaatgaaccatctcattagctatgctctgggatctttaaatccctgatattttgtgtgtaagtaaatgtgtccatgtgggtgtggatgtgtgtgcacatgtgtgcatacatgcatgagtgtacgtgtctctgtgttagatttgagttagataacttagaggttgatgacctggtttctgttactctaacacaatacctgaggctggacacttaataaagcacagagtgcttttattttatttatttattttattttggttcagagtggaggctagtgtggctactggttttggtgtgaatataaaattgcagaagccagagaagaaaaacaggaacccgaaggctaggagggaccaagcatgcttgccttttcccctccgtgtaactttcagagaacctagtctgcccctgccagacctgacatcatgatacaaatgcagagttccacacctgacctcttgtggtcagacacgccagggtgcggttgcactcagaatgttgtgtgaatttttctttaggatgtgtactgaatgtaagaaacagtttgaggctaacctggtcttcatagcaagtagttgagttatatagagagatgctgtctcaaaaaaaaaaagcacagagtagggagtgatcctggagtgatgagcagataagcacaccctgtggaagcatgagctgccttcagaccttagcacctgtgaggcaaactgcctgtgctcttggacatgcacagctgtaaccctgtcactgagctggagagagacagaaggacactggagctttctggttgttagcccagcggagtaaggcagagagagatggactaggacaccaggtacctctggcctttgcatgcacaatcaccgcacacaagagaaacaaacaattttcatggtaagactggggccccatccccagttagttcaccatgtgtgcacagtcctagagtgctgtccctttgcccaacatactggggcatgaagcacaaacaactgcatttctgttgggatttttaaaagatttttaaaattttttattttatttgtataaatgtttgcctgtatgtctgtctgtgtaccatgtgagtgcctggtgcctatggaggccagaagagggcatcagatccctgaccctccagttatacatagttgtgagcctgcaggaagaccagccagtgcttgtaactactgagctccagctcaggactttattttttaagccaggtactctgtgtagccctggttggtgtgggactcggagaatctgtgtgtcccagcctgcctgccttggcacttttcttttgatcctttttttctggatatctctctccatttctctctattccttttgaggcatagtctctctggtaagtcccaactgggctcaaagttgcaagcatcctcctgtcttgccacatgctgggatgacaggtgtgagtttaaaagagttaagttcctcttataatttttattatttatttatttgtttgtttgttttcttttggcttttttggggaagggttttccttggagcctggctgtcctgaaacttcctctgtaaaccagactggactcgaactcagacatctgcctgcctctctgcttccctagtgctaatgattaaagggttgtacctctaagcctggtaaattaagtgctcttagaattggccaggcatgtatcagttctgattcttttggaagacagacgttccttattttattgaaccatgctcccaaaccctcacctgggaatcctaggcaggggctccacccttatctcgtctgccaaatctcagtgctgtctatgtctggctgtggttcgcttctcaggcctttcgttcactggtcatttgtggggactatagaattcatcagtgttacctgcagcaggccatctgttgagcattatgctccactgcccaggtttgtctagtcaccccaccctccctgaggtgcagtattgtttgtcatttaaaactgttagggaaagtatggttgagaggctaaatggcagaataaacttttctctttcctccctcagctcgacccatttgagtccagtgatcctttttcatcctccagcatctcctcgaaaggttcaggtgagagagacttgaaactcctgtcctgaccacacaccacacctcagtaataccatcagttcccagataagtgtgctcttgggtggaacttttaggtccttgcctgaggctctcaggccaaagtgaatgcctcttcccccatctcatccttcacagggctgtctttctcatcatgagctggctttcttccagattgtaggaattgctctgttaacaccagtgctgtgggggactcgttcttaatggggacagtccacagttttccaagcatggtggtacctacatcttcccagcactgagaaactaaggatcattagtttcaaaaaagacccaggcatggtagtacacacctttaataatcctactactcgggagtcagaggcaggggcatctctgagtcccagacaagcctggactacagagtgcggccttatttgaaaaggggaagtgggggaatctttgccggctgatgaaccacacacacacacaagtggccatcctcagtgtctcattctctccatcttccctgcttctcctatactggtaggatgccagcttcaggcagaaactgatccatcctttacccactgtgatccactgacctcataggagccatcttcccagaaacattcacagccctgagtctcttgcttcctaggattgccctagacttttgggcacatctgctcagaccataaccccaactgtgttggtgccactcacagatccctttggaaccctagacccctttggaagcagctccttcagcagtgccgagggcttcgctgacttcagtcagatgtccaaggtaaggcctcttacgaaggcctagccatggcctgagttccacatgctgcttgtgtgggcaagcagacatgagtgctgtcctctgtgtgtgtgtgtgtgtgtgtgtgtgtgtgtgtgtgtgtgtgtgtgtgtgtgtgtgtgtgcgtgcacatgcgcgctcacacgtgcacctgcatttgtcatactcttgagcacaactgtacacagcagtgagaggacaggtcccctcaaagctgctgtatccatgtctcccgggtgccatcagccattgcccatctcgctctcattagcatcacagaaggatcagctttgagggcatgaagttggcacctctgtgtccaagcatacttttctgtctgccaaggccctaggaaaggaagagatagacatgttggtcccaggaggccagaataacaggcctcaggcttgaggtatctgaataaagttgactacacaaatgcctgaagcctccatgaactaaattcttgacgttattgaatggtgagctcaaaacgagtgtgaataaatatgtacatgaagacagcctgcattgctcaaggacaaaagccgtagccctgtcttgagctggagtgtctgaaaggcttccttgtctgctctggctctggaatacactatggctggcttcactcattaaaagggacatggttagagagccacaccgcaggtagcaccccagatgaactgatggggtgcaggtcttcctctagtactagagaggctcaggtggtgggaggactactgtgacttggaggccaacctgggctccacagggagacagacatggcagagaagaaagcagtaaggttcatccttatcaggaccttgctgacctggccttgcttggtgagagggattaagtcacagatcctggcccagcacaccaggtgcattgtttcagttggtttgatatatgttggtgtcatctttggcaatgaataaaaaggtcaagccagcctgtgacagcaaagtatttaaggacagtagtgtcacaggtgtgctgtctcagcccctgcacttgcctgactcagcaccttgtctactctgctcccctcctggcaaggatctgtccttagagcagtgttctgtgccttgcaaatgctcctcatgggcatggtttccccagcagagtccatccttctactcctggggtcatgtggttggtggtgcgggagtcatagggcagcaatcctgtcccattagttctgtccacctgaaggaggcagtgggagggaattctgagggtgcagacatcccttggtatccataaagataggttgcgtgatgtcccaggggatatcaaaatcctcactggcatccctcctgtgacatgactcagttcattgtgaatatgacagactgtacctctgggtggcttcagttgtcttgcaggatgtgagtgctgcatgcattgtctccattgtagtcagactgaaagaaactgcctgcgtgcactcagtacagatgcagtgtttttctctcctcagtgtgaggttgcttgaaggaattcaggtgtggaaccccaagagatggagacaaagcacaagtggcagccagcacccaatcctggggtccctgccctcaccaagcatgccctctttactggtgtctcagttgctcagtaattctcaggtgccaaaggctggcaacaggagcaacacttgtgctgcagtgaaaacctacacagtgacaaacatatacagaggcatggggaggcatggcttctagcaagagacctgcatttgacacacttaggagccctgtgcatgcagatccaggaacagccattgctgtaccctaagcagcacctggcattggagaggcagaggcagccggtggccacaggacctgtcggccacatgggggcagcagcctacaagggctggtgaccaagattgtctcaagctgtcttcagtgggctcctttctgctctctaagcttagaacccgtctctgctcattgtcagccccagcaaaggcctcaccaagtgtacaaggtgtctgaagttatgggttctgatggaaaaggagttttctccattgtactgtggccactggctggttggttatatgcatgcaagctgccctacttaggcctaagagtcagaaaaagaaccagaataccaaagacataggaggggaactacttaggaagaaagggttccttgggagttggagggaatgtcagctttgggaatgcatcacacatatgtaaaagtgttagtaagctccaagtgttccgtgagtggccatgcacattgctgtgggccggggcctgggctgttctacacctgatgtgctgagagtcgagactggagaatgtactagttgccaacccctacttaatccttccatggatctctgctccagttgcataggcccccttctccaaaggaatgcaagcctgtgctactatgtgccctctcactctcagccccctggcaaggataggaaaaccaggcccactttctgttcttggctctaggccaggacaaagtgggtagggctgtggaagaacttgtcccatacaatatatgcaccatcctggggcttcttgacttcatgacacttgtaaggattgtgcctgccctgccccacccactactgattttcctctctggttaccttgctagttttcaagaacaacacctggtataaataaatttgaagggaaatgaaagtagagtgcaagggctttttttttcctcttagctttcttttttttctttttttaaccatcaccaccagcccttccgcacctgagcagggtggggcagcatatgtgctgttcctcagtcctcgaattagagtgtcctagctctgtacatctgtgctgaggaaggtgacaacaggcatcttaccagcggtagagtctgtcttagggtaaccattgcttcgatgaaactctatgagcaaagcaacccggagaggaaagggtctatctggcttacacttccacatcactttcatcactgaggaaagtcaaggcaggaacctgatgcagatgccatggaagatgctgcctactgccttgttcccaacggcttgcttgctcaccagctcagggatggcaccacccacaatggactgggcttttccccatcattcactaattgagaaaattccttcatggactcatcagctgaggcttcctccgcgctgatgatgacttgaacttgtgtcatcttgacataaagttagccagcacaggttcccagctgaatattcttggcacttgctgagcatcagtgacatttgtttgctttaaaaatgagtttcccagcagcaggttccagcagcaggttcagtcagcagcatgagcctgcagagcatgatcagggccctgggttcatcccagcactgcagccagaaaggagatcaaagtaagtgagtttcctaaagtgtgttcatagagcacttgagaacataaatctaacttcttaccctccccccacctgcaccagacaaaaggccacctgtgcaatagtaggtgggtgcagcctatcttcagtgacttcggccatagtgtgttttgttgttgttgtttttctttttctttttaaaaaatgtttgcgctggtgctggtagaacacagaggctccaccccaagtcctttttggctgttcctcactctgctcctgagaagatgaacaacctactttgacaggatttgaggcagttgtagcggttattagctcattcctgctcctgagtccttgctgttagtggaagcataccttgttcttccccagctcccgtgcctgtgggaacacttttacaaacatccagcgctcgagtaggaaagagccaaattccaatgcccaagaagcctaagattgtccaaacaggctaaaagggggcctagaagcacagacctttaatctcagcacttggaaggcaggctagcctggtctacataatgaatttagaccatctaaggatacacagtgagacatttccaaaaaaagaaagaaagaaaataataaaataaaataagagtggaaacttgcctgggcattatggcactggactgaacagagccctatgaagggagccaggctaacacagctaagcctgtccccttcgaggtatcagtttggtggacttcaactccttggggagatgacacgtctgtcttgcctgggacattgcagccacctggagagtcacgcagcactgggtcctgtgtggattagaaagtagagctgctccggctcctcctccttcctgtgactcagggtttcctgagtccggagacctgtcccaggacataacttatacccaggaagcaccccaagaccaggaaacgtcatctgtactgcaccttctcttcaggcttctggatttcacacccagactcaggactcagtgcacacgggcttgagctctcatttgccttcagctaacaagtgccttttcattttctttattaagttgcatttcttttggggcagggtgtcatggcacccatgtgccaagcttgagtcaatattttttttccactatgtgaacccagggatcaaattcaggtcgctaggcctgcttgcaagtatattaagccatctttccagcgtctctcatgctgtgtcttgtctggaggctagagtaacatgcatttgaaggcagcctcagatttatggcaagaccctatctcaaaaaaaaaaacaacaacaacaacaaaaacagccactaacctgtagatgacccttgtcctacctccttccagtccccaaggcaggaggagctgagggtctgtagacacaggcttcagaaagaggtgagatcctgcccacgtgcctcacgatacacaagtgtcctcttagcctgtgaggacccatcttgggagccttcccccagtgggtgcctgagccccatgttcgctgttccatctgcacctctggaaaagtgtgactcaaacaaggcacagatggcaagtggaacagttacagcatgctgtaataaaagttatttcagacccagaaactgtttttctggaacttttcctcttcatgttctcagtgttacggatcatgatgtgacaatgtggggcagctgtattcaatgtgccatctctgctgctctatccagtgtctgacaggcattttacctgacacttcctttctggggcattccagacagtgaaggcctctcatctctgtcacattacagatgggaaatcaaggcacagggagttgggctgggatttcagttcaggttgattaacctagctcacctctgaccacagggctctgcagcctgaccaggctgatgttctggaaactttcatggacaagctttgaattaatactctgccatttgtgtataaagacttgagaatattcttggtagagtatcatctgcttctccctgcactgcagcctgccagcccaccaggccttcctgcatgaaactcccagctgcagggaatagggattggggggttgggggactagttaggaagtaaatatggagcttgcagagagccctgtgttcttgggtatgtatgtgcacatgtgcatatgatgtgtgtgtgtacgtgttagatgtcttcctcaatcactcttactgtttgagatggttctcactgaacctgcagctcacagcttcacctagactggcaagcaagtcctggaggtccatgtgcgtcacctccagactgaggacagggctagtttccatgttgtggccctatgcctacccttcagacagtgtcagggagcccaggcctaggtagtggacaaggtgtactgggtcaacactgatccggtatcgtctgggcaagccacattgacttctgtgcctcagtttgtctgtgtgtaaagcaggggtaatggtagtagaaatctctcacagaccatatagaagtagccatttcctgcccaggagcttctagaaagcattgaagggcctgctggtgtcagcttagatgccagagccactacaagtccctgccacacccctcctgtaaggggtcagtgcatggctagagcaggactgcttctcatactcttccctcagtctgagtctgccatgggtcctgggttctctggctcgctttccgtccttggcttgccctgtggggaaggaaacagaaagcgccaacccctctcactctctgggctcctctgaagagtctcatgtcatctttgggagaacccttctgcccagtacttgcagacaccctgggatggcagctgtgccatcatgcctggcaacacactagatgtttgtggcccatacttcgctcattatcttgtatgttgggtaaaacgtgtccactttattaaacatttcactctttttgagaaaggaactgtcttagtgttaccatggctgtgatgaaacgccatgaccaaagaaagttggggaggaaagggtttatttgacttatacttccgtattgcaattcatcactgaaggaactcacacagagtaggaactcacacaaggcagaaacttggaggtaagagctgatgcaaaggccatggaggggtgctacctcctggcttgcttcccatggcctgctcagcctgcttccttataggacccacagtgggctgggctcttccttatccataagtaataaagtgttctacaggttaacctgcagccctatcttatggaggcattgtctgtctgtatctctctccctctctctcttcctttcttcctctctctgtctgtctgtctgtgtgtgtgtgtgtgtgtgtgtgtgtgtgtgtgtgtgtgtgtgtgtgtgtgtgtgtgtgtgtttcaagacaaggtttctctgtagccctggctgtcacactgtagaccaggctggcctcagactcagagcgctaggattaaaggtgtacactgccactaacaagctggaaacctaacctttcctttcctttctttttttttttaagatttatttatttatttttatttatatgagtacgctgcagctgtctttagacacacactagaagagtgcctcagatcccattacaggtggttgtgagccaccatgtggttgctgggaattgaactcaagagctctggaagagcagtcagtgctcttacccgctgagccatctctccagcctctggagacattttcttttctttttttttttttttgagacattttcttaattgaggctccttctcctctcagatgactttagcttgtgtctcgttgacataaaactgcccatcacagggtctcactatcgccctaactggcctagagctcaaagatactcctgtactgcgattaaaggcgggtgccaccatacccgcccaaacatgtcacactaaaaactgtttttataaattatgtaatatgtatgaatgttttgcttgcatctatgcctgtggtagaggtcagaggaaggagtaagatgcctgggctgcagttgctgggagccacacccaggacctctgcaagagcagccagcactcccagtttcactttagttcttttaaactatagtgtgtgtgtgtgtgtgtgtgtgtgtgtgtgtgtgtgtgtgtgtgtgtgtgtgtgtgtgtgtgtgttgaatgcccatgtgcatttgtgattacaagagtttcctctttctaccacacaggtccagggattaagttcaggttagcaggcttggtgacaacacttccctatttgcttgctctccaccaggtgtggtaacacctccctatcttcctagctctcaagaggttgaggcaggagtatcaggaaactccaggactacctgacataagaaagcagtgtttcttacccacccctccccacacagcatatagaaggaaccagctcttttctgtgagcacctcagtcgagcttgtgtgtcactagtctgtccaggctgtgtcccccattagtcagaggcactgtatcctatgatgctgacacacgggcccctgacagccactgttcagcactgaccttgaaccatgagtagacgaggcctgtggcacaggaggaatgcccaggcccaccactgagatagtgccaaggcagagttgtgaccgacaggcagggctcagccacagtgggcttcagctactgaactacccatgggatctctaggatttggctgagtcctcagggccgctctcagagctcataccaagccttgtttgtttgtttgtttgtttgtttgaggaaatgggcttggggataagacccaagacttggccagaggaggatgggaccttggagtgtgttatgacgtcagccccatggatgccattgtcttctgtttatccacccagcagctctctcacaacctctctccaccgcacacccacctgtccctctctgttaatccatccatctatactcccttcatccatcagtccattcatgtgtctacccactgtccatctactccttattctatccgtctggcctagtttctttcatgttgctctaataaagtatcctgtcagaagcaactttaagggagaggggcaggctagtccatcactaccctgtggaagtcagggtagggcttgaaacagccagtcatatccctgtgatctcgactgtttaagatcgggggataaacacatgtatatttgtgcttagttctcagttctctcactttcaggattccctacttaaggagtggtgctacacacagtgagtgggtcttcccacctcaaatcatgtcataaagacagtcctttccccatgcctacaggacagccttattctgactttgagccctcataattgagactttctttcctggtgattgtagattgtgtcaggttgagggtttaaactaaccattgtaccatccatccatctactcatccatttaccctcatcagtctatcctgtcatctctccatcctctcacatatttatctattcatccacatagccattcacccacccatctatctattaccattgtctacctgccaatccacacatttacccacctactcaccatctgattgcaactgtcttatttcaggcagtggaatgggggctacttaaactgggcactggataagggaaacaagctgacatggctaccaagagtgggtggagatagtattgacttgccagcagatggggatgggtagccattggagcagacatgccagcctgagagggtctggtctgttccagtccagtagaggctgagaccatgcatgtctctgatcatgaacagaaagaagtcccagggacccatgtgcagtgttgaattgggaaagaacccacaatgtagcaagagaggccacaggagagcagtgttaccatctgctgcttgtattggctgttttcatttcatacagaggttttggctttgagggtaaaggaaagcgggggcttgagaggacccgggtattgccagggctcttggtgcggaagcatttgctcagtgccttctttttaatgtctatttttgcctctttcgtgtcctctcttacagcccccaccttctggccccttctcctcctccttgggaggcacaggattctcagatgacccctttaaaagtaaacaggacactcctgctctgcctccgaagaagcccgctcctccacggcccaaaccgcccagcggtcagtacgcttcctcctctcgcggcacccgccggtggggacagggcggcgggcacagggcccctccattgagcagcccagagtagagcagaccccaaggcagaacgtctcccctctgccaagttgcctccctgttgctccccttccccctcagagtgtgctgtgtgtgctgtgctatttccctgtcccatggtccaggctatgatggtgtcctcatcaatgtttttccatctgcgtggtccctcaatgtctatctagtagcctcctggcctcgcgcctttctcgtgggggtggctacagcaggggctcagggtagccttgactggatgggcacttgggtaagatagtggctttcttggatgttttgaatgagcaggacggcctggctctccattattactctactcagctggttgagagaaggctgcctgaggagcttcctgccctcttccctgtaacttcactctcctgagccctgcttaccaaagagggccattgtgtcctcccccagcagattttgagtacttgtgacttctgtgttaagagctagggacagagctgactggctcagtgatagagcacttgccttgtgtgcccaaggccctcactttgatatccaatactgtgaagaagaaggaacatctgagtgacacaaatgtgtaacatctcctttccagtccctaataagagcaggtgccccttgaagggacctagcctgccccagctcactgagtccacatgattaccactttctgtatagtccacctgcagaagatggatagacggaagaaagccttaggagtctctcctcctgcctcatcacctgggcccacctgtgttcctcagggacaatgcccacactgccttccttataaggggggtctggccagcagtatatgacttgagtagcctgtgtgaagtactggagaggagccttgcaaatgatgttgactccaaagtgcaagggagcccttctgctatgaacagcgccctgcaccccctcacctcagtagcttcatgctgatggaaaaacacaagcatgtacacaagcacacatgcccacacatacatgcccttcattcacaggcagcgtgtgtgtgcgtgcactcacaccatctcatacacatgtgtgtccccacacacacacacacacacatgtttcttttttttcaatatttatttatgtataggagtataccgtaactgtcttcagacacagaagagggcatcagatcccattacagatggttgtgagccaccatgtggttgctgggaattgaactcaggacctttggaagagcaatcagtgctcttaactgctgggccatctctccagcccgtcacatgtgtgtttcatcactcaaggctcacatggaccttgaaagcaaaggcttgaacatgtctgcacctgtgtacatgtttgcatatgtgctcatggtgccaaatgtttgagtgtcaaatgagaattcattcccctagtatgccacactgcctgtgtcaggtgtacagtcattcatttgcatgtgttctcatggagacacacaccaccaccccatacatcgttccatgtccttctgttttgtctgcttctcgtgctagatttatagagtaaggacagcctgtaaaatgctgagaaagccctcagtggcatcagagccaagtctctcaagaataggaccaggttgggacctcagggccatcagccagccctgtctgaggctctctggacctgacttattaatgatgcagagctgggctctgccacagccattatgaccttgggaggcctgaagcaactgttatctcttcctttgctagtgagaccatgagatccatggagcaggcaatatgatgcccacttaccacagaggaaggtgggcatgtgggccacccagactcacagggaagatagcatctgcactaggccttggccccccactctgcccactacttgtctctgttacttgccacttgctcgtacatcagcaatcaggagaacctagccaggagagtcctcatcctgagaactgtggctttcgtacattctaacccatgagcagagcacctgtgggcctaagcatttcttattcactctacccagaagcagcagctggagagaaaggcacggttgtgtacacactgctgggtggtacgtacagatgtgtggtggatgcatgtcagcccagcatcccatgctgttgatcttatcttagtctctaactatacaggtaccacatggtacctgtgcacagctcaggaccctcccctgcctcagctgacctattaattagccctgtttgatgggaaagcatttggctctttgccccagctccctggttcatgcatggatttggagcatagccgtgcacttcctctgcccctgacccatccttatcacaccacagccactcacccaggttcccagggcaacagtgcacattgaccagctccaccgctacactcgctcagaagccaaagtggaaactttatcttattttatggtgtttgagacaggatctctatggtgactgggaactcaaccatcctcctgccccattatacactgtttttggatggtggttttctgcctacccaatttccattggggaaaaccatatgaccagtgtacagcaataaatacctttagctggtcacaccccattgctcagtcccttgggatgtcagacagatgtggaactctgcagtgggctggtcccagcatggctaggaggagatagatgaggtgagggtgcctgcccaaggacctccagggatggtcggccttctgatggagaaagcatgccacagtgcttcccaagacatgctttacctggctcaggagtcaggagagacagtggcttctctgcagtcctgctgccctgcatgtgagagagctcttaggccaccaccttcctacctgggcttttctaacctgaaggagctagtgggctctgggctacctatccaactctaaggggttgttcagtcaggctgctttggggaatgtgaaggccccaggcagatgtccctgggcagccctgagtccaagatgtcagtaaagcacttggcatggtggtgttgtgtgggatctgtattgtattatgtgttcaccccccacagccacctgtgtcacctgggcctgacccagatgaggtgacaattcagaaaaatgtcttctgttgaaaagtgttgatgtttaaggtgtcaaatttaaagccagccctgggtcccctgagaatcattacccaggatgagtgtcagtgtgggcctggggttatacactactctgctgttgtgttctatcttggagttcagtctctgctctcacagagatcagtttggtctgtcgaatagtctccctaagcatctggacagtcactgctgctggtagcagctgaggtggctagcagcttgatgctaagggtatagttttctccttgaagcttcagagtgtgagccttaggctgctgggatgtgcacagaaattggatgtcttgaaagctctacattctcctgcctggagatcttttctagaaaggtccatcaatgtattaaataacctgcaggtgtctgggactgaagcagttgattgctttcagacacatgcaaaacagccctgaaacacgccagttggagtgagcacacgcctccctcaggtaaacagtggtgtattttcttcaacggacggagatggagatcagtcagaactcaccgctgaagtttctaggtaaaagttgttgatttgcaaagagagaaacagatttttttaagctcaggaaacggctgtgtgggcgtcagtgattgggttgcctgagatagcgggatcctggcgggccccaccctgccacttcctgccagcgctgccctgcggctcccagcagagcctacccgctgccccagtgacacccactcaccagccagtcacctttaacctctccctaagttaatgatcatctttataactactcatgacctctccaccccatctgcaaggccagatgtcctacaggaggaagattttggcagctttttttttccctttcccacagcaccactgagagtgcttgtgttagtgagcagcccattcccaagctacataagaatggtctagcctgtgtattgaattcctccgcaaaaagtcattctcctcgagcagaaaagtcctcccccacccacatgctatctatgcagaatggccaaggctttctcacagggtcagcagggtacaggcacagggaatatttaggattgtaagcagcccaatcctgtgaactttcagcctttctgtgagatcccaggaagaggatggaacctgcgggtcagggccctggtgctgctggctgtcctgtctatgcccaagccccttgttacttcgtattgtcaaatggcatcactgtctgagcctgtggttagcacctctgccctgaatataactactttaattccgttcccacgatggtggcaaagagataatgcgctgggtacactggagagtatagaaaggaatgtacttgttccatttcaggaaggttctggtgttcgctagcagccaggatggccggaaggcattgaagcagcccccagcccccacacactcagggcactcactgctctgctgttgctatggcaccctggagggtctgtcccagggctcgggataaccagtggctgctgtagatctatgctggctgagggagggaggcacccatatactgtatgggtttgccttcccaggcggtggaggaacccatgctaatccagctggtttcagcagcctgaggccggctgttgttgagggaagatttggcagaacagtttgaaaatagaaatagtgcctacctcagcacacccacccttttgcactcagcaaggtggatccagtgggtgtcctgtggcctgatattcattaacgagtaaatgcctcaccagaggtgggtcacaatctggacagtggaggttctgggggacctgcaggatgtaagcccagaaagactgggccttcctaccgggcctctgtggtagtaagtgggtgggaacaactcccaggccctcacttggctgaaggtccactctttgatcacctaaaggactcaggccaggtctctaggtatataaatgattgacacatcacccctgtagtgagctcagtatagtagctcacgcttgtggtcagtagagagccaagtaggaaacccctcccccaagtctacatggtcctgtccaggcctgtgaccctttccaccacggggcacacattcccactgcagacatcacagtctgtggtgactttataaatgtgccaaagtgtctacctgcccattgtagaggtaccgttctgtttatgtttgcaccctgtagggaggacaaaagtgggaggtcctggcagcccccgtggctgtgcatggcaagcacctaggactccctccactgtctggcttctgtgtagataccatctccctgtgcacccacttgaacagaaggattgtggcaaaggtgctactggagaacaagtgggagatctgtcaatcttttgcacaatgaagacttacaggtgcacggcctggtggttcatgcctgtgatcccagcacatgggggctgcagagtgaagcctgtctcagagcacagttcatgtcagccttgcccatgcctattttcttctgcaggctaatgtccttcatcagttcttcatcagagatcatagcagccttgtgtgaaaacggaaagaaagttgtcttcctcacttcaaatccatgtgtcctttgtggacccagagcaagtggccactagattcccttgccatggaggagtgacatctttgtctaccggcctgccagccccagagtttcccatggcccctgcccacttgacagcaggcgaacatagtgccagcataggtagagataacaaatatttgttcagcttttcccctcagctcagacccaaacctcatcctgtcccctccaatgtgccaagctggtcttctcaaaaattggtaaatatttttggtggaaaatgtcagcaccatgatgtgatctgggacctcagacatctatcacctgggctgcactgctctgctgtgttccaacctacctagtcttcaggacccctgcctgcaggccctcagtggcctggccaacaggcttccagaacaagtcatcgggaggatggaggtgtgggcaaaaaggattcctttcacatgacagttgaaagtttgagtcaggcaatctgatttttctcttctctgccatcacttactcttattttgctgttccactagggcagaatggattgaggtccctagtgacctcttgatgtccctgtcccgtgtatgtccctcgtccagttcccatcagaaacctgatgtataagcaactggtactgttctgttgagagtaaaatcactgacagtgtgtgtcctctgggacacctaacagttctgtggtgcccgtgtcagggtgcacagcagtgtgggagagtcctgggttgcagaggatagtggctagggtggggcagctgccctgaccacaaagctttagtctttgtttttctggttgtcttttggggggtgtttttcctgtatttatctcccatctgcagagctgcatttttttttttaagtacagcaatgaattgtgtcaacagaactcgaagtctgacaagagcaagcgcatgctctctcttggttgtattttgttttatttgcatttccacatacaccccctcccaagtatagcaaaatctctcacactgtaccccaggctggcttgctcagaactcacaatcccctttcgtcagccttcggggtactgaggttagagctgtgcaccattccttatatatgtggtgctgggtggagcccaggactccctgttctccaaacatgttgagtgttctaacatgtgggtccccagtcctgacatttgatattcttggtaatcagatttctaagaaccctgcaccccaggtctctgactgtcctcctgcatcagcttcttgaatggagagactaccctctcgaagctgactattggcagttccgatacatttcccaagcctggctcttggcaattccaatacattgtccaagcctggctctgggaattgctcaggggaatccctgaaaagcaagctgggaaagagataggcaccttcctcccccatagtctctgggtgtgctgcctctattgctgaggagataaatagcctaggaaaccagagaaatagaaaaattaaagaaattcctaccagggtggggccggccactgagtaaggtttttttttttttttttttttttttttttttttttagcagagtacgctgtggtaaaccatggagttcgtgttgtttttgccgaagtcagtgctgtgtgtggtttcggtacaccgctcgggcggctgttgaaactgctgtggtttccacataaggcctactgtgcctctccagtccctcagctagtgcactgggggcatgggccaggggtgccatgcccactatgagcaccagcctgcaaagtttttgtgtaacttttttgttgtttgttattgtgagagggctctcactagctgtctcagagccagtccctggctggcctcaaactcagagatagcctggccaaaaactgtgttttttattattattattattacattattaattattatagttaggagtgcactcgcctcttccctcggtgttggtttactatatttatttgcttctgtgtatccttgagtcagtggcatacaggtggagtcagaaactgacgggagttggtttttccgttgtgtacattttaggaatttaccttgggttatcaggcttaggagcaagcaactctgtctactgagccattcaacagtcccttgttttgtcttttagatacaccctcagtatgtcatccatactgtccttagactccagattccctcctcagcagtttttagtttattccaattccttctctgtggccatttctccatgctcatatccaaagagccaaaagcactgtgaccttgcttcctacaactggggtggacagagtgactttgtcacactgagaatcaactccacctcagaaaatagggaaagcgattacagagttagcagaagtggttacataaaagcaggaactagattcagccttaacaatacagccaccaaaaataactcagggtgccaagtcccagactcaaaccagggccatgccaacctgcaaatgacagagacctaaagtgcctgtacgccagcacacacataccaaaaaaaaaaaaaaaaaaaaaaaaaaaccacccatatgaaaaccgtcatcctcctttgaaaacaagagataccagttactgctggcgggtttcgtgagcgcagtcacaatttctaaataacggtttcagctgtaccgagtcttggtgtaaaatagtcttttcgttcctgattcccctcaatgctctcagaagcctgagcttcacatggctgcagccagctggcttcccacccctctcagcaaaactctttgtttctttgttttgctttatttttttaattcctcaagccagaggagaaagagttctccatcatagagatgagagaggttcagaagtggctagtcgccgggtagtggtggcgcacgcctttaatctcagcacttgggaggcaaaggcaggtggatttctgagttcgaggccagcctggtctacagagtgagttccaggatagccaaagctacacagggaaaacctgtctcaaaaacaaacaaaaacaaaaaaacaagtggctagtcacctcctgtccctgctcaggtgtcttcagacctaccacaccacaagaaatgtcctggtcttaaattattattgttcattgtttttgagaaaggctctcatggagtccaggcttgccttaaactctaggtagctagtgatgaacttgaactcctagtctttctgccttaatccccctgtgccagagtcaggcatgatggaccatgcctaattgctcgtgggtagggaatgaaacctggagctccactccaggctaagcaagtgccctacccttgtttttattgtgagacaaggctggctatggaatacagtctacatagcatgtttaaggctacaggagaccctttctccaaaaacaaaagaatcctgtttccattagtgacctgttctgcatagctcaaggtcagagctttcaaccttggacttgatggtgtgatgtggagacagactgagagcagacaacacaggctgggtagggatgtgtaaggaggtccctcctctcctcatgaccctccaggatccagctgctgcagtcttgagcctagcaccttgcccagtactaggcctgcacaggcatgtgttagtatgtgtgcatgtatgatagggatgggcttcagaaaccatggtagcacaagatgatatctgactggaaaagagtgcccaggtttgggcattactgcagaaatctaggagagttgttacgttcctggactttcctggtgttcagatacgtggggaacccagattttgtgctgtggagagccacattcagtcaaagtcctccctcccacctggtggggggctgaagatggagagcaaagacagactcttgaatagttttaatccctgagaagaaaatgagaaggcacagcaggctttagtcacaagggccacaggcagtgacaggaatgtatgtgagccaagcagtgagttagcagtaagtgtggatgggagaaaagcctgatggagaacaggtgaggtgaatctgtgagtatgctaggctagtggggagatctgagcactcaaatgaggacaagcaccttgtccatgtcacagtccctttgcctgacttccttggctgaggctctctgcaaataggatgtgcttatagttgtgttcatagcagtctggggactgaagaaggaaactcagggcagcagctagaccctgtctccataccaagcatgtatctggtttgtgagcatccccagcctctgttgcctgcttcctcatttctggttgagtgggcttgctgagctctggcttgcagggggctggaggttggcagcagggcagagagaacagccggggttcttaggagtaggagaagcctactcaaaggagccaggtgtgtgcccaccctcctgacagtgtcttcaggtctgtaaccatggcctgggcagaaatctaaggagaccggggtggtggtgcatgcctttagtcccagcagtcaggtagtgaacttcaggctagcctgctctgcatggtgagattctacctttgggaggggggagcagcggccttctgaaaggacagtgcagtgatactcaacggactccaccatggccatgcatctgctgtgtccctgtgagtatgtggagtataacactatgaaacttcaggaacccttggctaccctatcaggttcttatctcctggtggtggcaccaggttactgtgatatgagacttacttctcatagtgctgtacctctggcctaagttaagctgagacacagcctggatctgacctattgcacattacagctgaggcccagctgccacagctgcttccagaagagagctaaaaccagggctctgtcaggcacataccaacaacggctgctaagtatcacccacaggcagcagcacccccagtctcttcattcttgcaccacacacaaatggggaaattaagaccaactagccctcagaacttttcctccatgagccccagatcagaaggtggcaggttcagaataaacttgaagccctagacatctggaagctcagaaattgaggtgggggttttattggtctggggaaacagaacacggtactaagatcttttcttgcctttacccattattgggagatgagggccattgtacgaacgagtcagaacagccttacaggatgtctctctccttccatgttggcgcctgggatggctcaggctttgtgttgtccccacaaccaggtgtccaaggtcaactgctttcgtgtctttctaaacgatgactttgaaaccgtgtgagcttctgtgggtagttcagttgataccagggagctatgctgacctggcccttgggactaatgtgtcagccatgttggatgtctggactctgcgtgctcaggcacaacaccaggagtcaagagagccaggctggacattcatacttttttttgttgtggttgttgttttttttttgttgttgttttgttttgttttttgttttgttttgttttttcgagacagggtttctctgtgcagtcctggctgtcctggaactcactctgtagaccaggctggccttgaactcagaaatcctcctgcctctgcctcccaagtgctgggattacagacatgcaccaccactgcccggcttggaaattcatacttttctggtgtgtgcctggtgcttgtcacctgtagtcataccctgtactctagtgagttggtggcctcgtcaccagggagaccttcctaccccctcttgctatccttagaagttttcaatgtgtttctctgctcagctgtgatggactaaagctcaagtggaaacagtctaccagtctcactctaagtattctttgaatggatacatagtaactagagaagtgtgggccagtgacactgtagaaccagaatgttggtactgggaaccaaacactctgcaaaaacaatgtgtctataactactaaagacaggtccagtgttagctgctggtgcatgtgacctgaagtaagcttgggccaggtggtacacacctgtcagccttgagcttggtagtctgaggcaggaagatgagttcaaggcccaacctggcctacataagactctgtcttaaaaacagctgttaaaaaaaaatcactctcctggcatgaccttgctacactctgttccaggttaatatagaatgtaactccattgtataataagtacagaatgggcatgaggtcctggattccaggcacacacaccccaaagtcagaacccccagggccacccttctctaaatctccctgctctccctagagagacagccaggtccccactctagtcctagtaagtaacttgtatttcttcttctttttttttttttttttccttttctgtttttgttttgtgttttccccctaaactttccaggtcagagtacacctgtaagccagctgggttcttcagacttccctgagtcccctgatccattccagccactcggggctgacagcggcgacccgttccaaaataaaaaggggtttggggacccatttagtggcaaagatccatttgccccttcctcttcagctaaacctcctaagacctcttcctccggctttgccgacttcacctctgtaagttgagtcctccctcggccaccttcctgcctcgcttgctgcttctcggggtgggggtccctctgcagctatggacactgctttgccctgctgctggtgcctcccaacagtcaccaactacttttgttatttattctgcgatggcttctgtaaggcaaatagactgttgataaagatgagagccatggtttaacgaactgcagggagagtggcgtgcgcacacacacacacacacacacacacacacacacacacacacacagcatgcctgcctcagtactcagtggcttgtgatctgtggccctcagaagatgttctgttcactgggtctttgagacaaggcctagctatgtaacacaggctggcctggaactcaaagagtccacctgtctctgtctttagttggtactaaaggtgtgtgccaccacactggttcattgtgtctggaggcagagcagacaggcacttcccgagaccaattacaaacatttcaccaggattctgctgcctccaaaaagacctttgagtcagtggtcctgcccaagtgcatcatgcaattaggagcaaaagagtccaggtagggtatccagagagtgagagatttggatactgttcattgtgcttttatctgatttctgtttattagctacactgaaaaatatttcaacctagatgaccaccttggaacctcttttcttttccaagggttcagaaagaccacttgtccaaagtggctagagactttgtggaagctcccagggctctcactagcactgccttgctatctgtggagagcctgccagtgccttcagcatagcctcagcatcctccagcacctcagggcagccgtgcttggtgctgtctcctgtaatccatttcgcccttcaggttgaggccgtttttttttcaagagctctcctttgtgctggtgaagctccttgcttggctgtcaggagagactggagagctgctctgtttactgatttatgtttgtttctttgaaataagcctggaccttcttagtctctatcctagaatgaccttgagctacttactgatccttgcaccctaacctatgtgtactatgtgcacggctggaatgacaggtgtcaagcggacctggagggctgaagtgtgtagctcagtcatgatggacaggcagagcctgcatataaccctagcttccattcccagtacaaaaccaaacaaaacccacttgtattgcacaataaataccctggtcctccccagccaattgtcctgtagcttaatttgaattgcctaaggcatacctgggcccagtggcagttacctctcatcccagtactgggatggaaggctgaggcaggaggatctcaagtttgaagccagcctgagatacagaaggagatgctgcctaaaaatattaatagtaataatatgttgattcctggggtcttgtaactatttgtctctgtagcccatcagttccgttgacagtgcctacaatgtgccttcagaaaagtgacattattagtaaaaaccagagacaaaagcactttgagttgtttggatatcaccagggttattttctggtggaaactactaaccacaaaggccagagctggtatagtgagtccagcgtgtgcctagcatgccctgccctgggcccatccccggggccacacagccttctctctcagcagcaggattaggagttccagttcagcctggactacaaaaataaaataatccattttaaaaacaagcagtgccgggtgtgatggtgcacgcctttaatcccagcacttgggaggcagaggcaggcagatttctgagttcaagaccagcctggtctacagagtgagttccaggacagccagggctatacagagaaaccctgtctcgaaaaaaaccaaaaaaaaaaaaaaaagattaaaaccaaacaagcaaacagcacagctgttggcacatgactccagtgctcggttcaggcaggggagagtggtgatggagctgaaccacagtgtagagaaatgactggcctttctgaaaagccagtttacttcctgtgcccacacaggcagaacaccccagccctgctgttttgtcatgaacaccaggttccaagctgtgactgagctaacaactcgttgccccagagtagttacaggcttcagttttatttttcaagtttatctgtttgttgtttgggttttgagaaacggattcacccagtctggtctcaattttatagcttctaaatgctgggatgtcaggcaccgcaccatacctagtttaaattctgatttaaacactctcatctccagataggaaaccaaatcctgcctggcctggcctgtggccttttattgttatgaagttgttgtcaccttcaccaccacgaggggccctgtgtccccatcagtacacacggtcttctctggaacaggaccatgttccagaaaaatctggtaggattttgaacttccccttgctgagccataaatatactgccctcccaggacttgggatggccctccatgagcctgctttccaggatccttgggactttaatgctgtgcaaactctgaaaaggttgtcatcacgtacagaaagcagcctgcttagcttgggcttccagaactgatttcacccaagcaggatggccactgctatctttggtacctgcagtggcaccccagagctttctggtaatgggtgactgcccgccctcagtagctccttagcactcgcagaagcttctgggctgtgactgtagctcagcaatgcacacttagtacacctaaagcccaagactttatccccagcactgtgtaaagcagacttggtgcaggcctgtcacatcaggaggtcatcctcagctggttcaagtccagcatgggttacaagagaccctgtctcaaaaaaaaaaaaaaaaggacaaaggagccagcactttagtcccagcatatgggaggtggcagcaggtggatctctgagttggagggaagcctgagctgcatagagaaaaattttcttaaaggcaacaaaaaagaattttctttacatccaggcaagtcttctgcttagcaggtgcggtggcgcccgtcaaacttctagggaattcagggccagcttgggttgcctgtgtccctgtcctacagaacaaacagcctcaggctgtgattgtgatcctccttaaaagcaatctggtgggggttttttagccaagtagcttgctgttgtctgcacagcttccctgagagccaagcagacatcagactggttgggctgggccttgcaagtactccatgaacaagctgggaagtgggggcagagcctgtctgcatgctctatggaggggcatttccaaatttccaagaggcttcagaaataaaatttttacttcttgacacacattctcaatgatgatggtgtatgagaaaggtggactcctgctatcttggggcacctaagacacacaggtttagctctggcctgaggagaattagaggtggcccaatccaagcagggatagtcagtaaatccctgagaaattctctttctggaaatttctctcagcccaagtgcttgttgtgcttacagagtacatgaggcaggtctgtgtggaattccctctcttggcctccagctctgaagcaccccagtgtgtgggttgcagtatggaaggggccttgctgctagacactgatgggggcttgtctgaggcagggtgatctgtaaccctctgtgggtacagacgaggggacgttgtcagttactgctgtctgttgatagatgatctgagggccaaatgctctagctgaagaagcacctaccctcattcctccacaccaccctgcaatgctctccctccccaaggaggctgcaggttgtcagtctcactcactgctggtgtctgtctgctccagaggactggaaccttgtccctagtgtcacaaatattccttggaagagacagtggttaagaagactcttgatgtccctggacaagaagtaggctcccttggggcttgaggcctctctagagggcatggagcagagttatgatctggtagaatgtggctgcagccctaaagagtgtgggagtgttgacaatcaggaggggtggctgaggcagtgggattggttattgtgctaggccaacctgggctacataaggagactgtttctaaaagagacagagaaaaaaaggctatagaccgcacccatagttattggatctgcctgctagaatcttccagcactaggtccagctgcctctctctgtaaggatgggtgcctagccctccagtaggcagctcaggttgaatgcaccctggcccttcttccatggggtgaagtcaggccccagcatgggcctctggttgtatcttcttaggaccctccactctggctctgagccctctctcactatccaatcttcctttgtagtttggcaatgaggagcagcaattggcttgggccaagcgggagagtgaaaaagcggagcaagagcggctggcgaggctgcggcgacaggaacaggaggacctggaactggccatcgccctcagcaaggctgatatgccagcctaggtgacacaggggaagccgcagctgtatgtacacatcccttcaagttgtgccatgccacagccaaggacagctggccacagggcctcaggctacagggaccttgttgagaggcctcagacactgctcacccctgtgggtgggccaggaaggcagctataggtaaaagtcctggaacctgccagtctctgaggtatgatggtgatcagttaggctcttccttccaatcattcagtggctgacagagaaggcctccagtctcctagctgcagacaagctccacccccagcccttccttgcatccacaagacaccccacacacatgatgtatgcattcgttgtataaaaatgaagtttgaatgattaatataaaatattttaatacaaaacatgagactatcttctttttaatcagaaagtatgggtcacgggctgagccctccccaccagtgattgggagaggagccgcattgtctgttttttggttggttggttggtttggtttggtttttcgagacagggtttctctgtgtagccctggctgtcctctatcctggaactcactctgtagaccaggctggcctcgaacttagaaatctacctgcctctgcctcccaagtgctgggattaaagccgtgtgccgccactgcccgactgcagtgtctgttttaattgggtatgagtggtgagcatatatacacaggtactggcaaaggccaaagtgggtgtcctgtcccctagagctggagtcacaggcatttgggagcctcccagtgtaacttctgggatgctcagctcctgagcaattgtgtgctcacaactaggtttttttcctttttatttaattattgcacatatgtgtgtacaagcatccattgctgcacagtgagtgctcagatgtcagttctttcctccaaccatgaattcacactgaattcaggtcaccagacaattcaggtcagcaagcacctttacccggtgagactgtcacagagcattttgttgtagataatggtggctttggtttgtttgtatttaatgtctacatgtcaatctgtgcatccctggtacccatggaagccagaagaaagtgccaggttccctggaactgaagttacagatggtagtaagccaccctgtgggtgctgggaactgaacccagttcctctgcaagagtattcaacacttttaacccctgagctatctctcaagtcccactcagatgttaaattaaaggcaacttaaaaccacaaagaagccaatttggcactttttttttccattttccaaaatgcatccttctccctctgcttgggggagaatgcttttaaaaggtaggcaggttgctgaacacccctttcttctcagtacccaaaatgcaggcaagggcagcttgccagtctgatctacataatgagttccaggacagccagggctacaaagaaagaccctgtgtcaaaatgacacaggtctgacacctgagatcagaagtgaccagggatattcagctttctgcatgccgaaaaacacgaaaagacatggccacttaccatccagtgctgggcaggtggaaatactgtggggtgttgactatctgtgtgaacagccttgggccattgtgattccctggagcttacagttaacttcatgtgcttaatggggtattatatagacctggatccaagccccagaatctcattatgatgggaaacatttcaaaaaggacctcaactaagtatcactatctataagctcacacctatcacaccagagaggaagaggcacacagatcttttgagttctaggctaacctcatagtaagaccctatctcagaaagggaagggagtgaggttttttccaagcttatattttatttacgccggggggggggggtgtcatgagtgtgcagtgcccatggaggacagataaaggcatcagatcctggggacctggagttacaggtgttgtaagctacccaacatggattctgggaactgaactcttgaccccgatcactccagctccatattttacctggtgtgttttaaagtgttgggtggcactctctgctgtgcggagaagcctggaaagaagctgcatccatagttggctggctgattagagctacagggatatggagggctggggaggttgcaggtccagagtctagttacaatttatctgagctagttttagccccttcttagccatggcttgcccacctcctgtggtacccagtatcccatgactactaggcaagaaactccttgggatatataccagcttcaggaaaagaaaaaaacagaaagctccatagcttctgtgaacgtgaaagccaggagccatcaggcagtaaccgcagacaagctttccccaggctgcttgtaagcagctctgtgacatttccatcctggtacttggaaagcccttggtttgtgactttgtcactgtaaaaacttaacaaaatggcttctatcttgcagcatagactttgaggtgacctgagtgtgtgcggtttggctccagaacaaagtttcttgttcccattgaggcgaggctgtgctttttgcatccacctctcgacacagttcagtcagacttggtgtgccaccgtgtgccacctcaccagcccctcacctttcttttttaaggaccagtttagatttagaatcacagagatgcagagagtcccagaagccctttgtgtcactgcccatccctgcatcttagttatgcagccagctgcctccacttcccctcagctttctccattcaggatcccttcagacctttaacctcagtttccttcacttctgtgtgccctggaagacattcttcctgtagaccttgggcctccagtgttcaggaagcatgtatgtgcagtgctgtctgaggccagaagaagccattagatcccttgaaactggacttgactgtcccaagccaccatgttggtactccagccccaaccttgagacttttttttttaaagatttatttattctacgtatatatgagtacacttgtagcggccttcagacacaccagaagagggcatcaggtctcattacagattgttgtgagccaccatgtggttgttaggatttgaactcaggacctctggaagagcagtcagtgctcttaacctttgagccatctcttcagcccaaccttgagacttataaggctttagtgaccaggtgttctgcccatgtccctctttgggattcctgttcaaaaggctagagaaaggtgacagcttcataggagaaaatgcaggcaagaataccctggagggagtgtatctaaatggctgggagatgatccagtcaggaaagtacctgtcttgaaagtacgaagacctgagtttgagcccctagaagctatgtaaaacaaagcctggcaggatggtatacacctgtactgtaccccagtgctggaggcagagacaaaaggatgcctgaggcgctctggctagccaggccagtgagctcatcctacaggagctctaggatcggtgagagaccctgtctttaaaaacaaaaaatatggagagtgtcacatcatctgacctctaaggtgcaggaaagccacacccgaaagaaaaaggattgctataggcagccaggcaaggcatcacacacataaccccacattccaggagctgagacagaactaagcagccacatggagatgtcatgtctcaaaaaaatgagtaacaacgaagcacgcagccctgtactccatccctggatcacaggcgccaggcttggggtgcgagtccaacagaagcaggaagataggaatttcaactcaccctggactaccagagaccctgactcaaaaatgttaatatttcataacacacaggaaaaagaaggcttggagtggagctctgtgacaaaccggtctcaggggtaggggttgggcttggtggcaaccatctgtagggctgcagggtgtggggagtcactgcctgggccaaagtatcctgggagatgaactaacccacagattagagctaggactcctttttttgtttgtttgtttttttaagacagggtctctctgtgtagccaagccagttcctgatatcaacagccagcccttactgtcctggaactcctctgtaaaccaggctggccagctggccttgaaacaggatctattttcctctgccttcctgagtcctggaagtgtgtgccaccatttggcctgagtcagaactcttaagaggtgacttggtgggctggagagatggctcagcagttaagatcactgactgctcttccagaggtcctgagttcaattcccagcaaccacatggtgggtcacaccatctgtaatgggatctgatgccttcttctggtgtgtctgaaaagagcaatggtgtactcatatacattaaataaataaataaataaatctaaagctataatagaagtttttttggtttttgtttttaaagaggtgacttgcattgcaaattctgatattcaaattgcagatgatatgaactcactttgatttcaggtcaagagccaagggaccaaactgcccctgccaagtggaagtttaacaccctttggtcagactcctgtaagatcaatttccaggtttaaagctgttttggttttttttttttttttttttgaaaggccatttatgtcctgagccccttctgtagggctattttaggaccaaacaggaaacagccagaaaacaaactgctactaccaaaaataatggacttaatatcagatctagtgtctttcaaatgtggggctcccaccctctctcaaaaaaatttccccagtaaaaagttcctaggaactgaacaaattgtatcgggaggtaagattggaaaaaaaaaaaatagggaaatggaaacatgattgttatctctgtttattccaaagaagtcacatgacagggctgtggccatggacactgcatgggtctttagcgtgagctttgttttctggcctttttgtttagtttctgggaggggttttgtagcctccagcattctgtgtagctaaagctggcctgaattcctgattctcctgcttcagcctcctgaagtttatcctctttattataaatactttgtcaggactggtgatgtttcagttttgtgaaggtaatagctgccaggggcctggatccagtcagctatggcacatgtgttctgtgtgcttttgcacacacacacaaacacagtagcacctgtattcattcacacacacaagctatggctgtggcacatttcttcaccacacacaaccagtcttcaatataataataataataataataataatacaataactttaaagaagaaaaaacttctaaatgtgtattttgtcagtggatagtggtgtgcacactgtccaaacatttgggaggcagaagaaaggaaagtacaggtttgaggccagcctggggtacatgggagactctgcccagcctgggctacatagaaagaccttatctttaaaagcacccccctcccccattaaaaacaaacatatttatactcaagattaacttcacttgctgtctgagagagaggtgtgagcattgcctccaatgttgcctctaactggcatggtgagatttaatgtaagaaacacaacctcaaatcatttcactcagacctatctgcattagttacagcagtggttgtcactgatcccctcagccttaggaggtggaggcaagaggatacagagtttaagcccagcctgtctcacacaacaataaatataggtgaataaccaaggatggaggtgcgtgcctcccatcacagcacatgggagatagaggcatcctggtctacatagcagactcagggcagcctgggctgcataatgagactctggctctaaataaataaacaacaagtcacatggcctgtgagatggctcaggggttaaggtgattgcagcccagcctgaggaccagaaagaaggagggactgactactgtaaattgttctctgacctccacacatgaccatagctttcacacacacattaaacaaataaataaatgcaatattaagaagcagcgaaacacattatgttactctgggtgtagatggaggtggtggcacacgcctttaatctcagcatcaggaggcagaggcaggcagatctctgagtttaagggtagcctagtctatagagcgagttccaagacagccagggctacaacaaccagcacaagaagacctacagagtcaactaacctggcccatgggggtcacagagactgaactaccaatcaaacaatgtatgagctggacctaggcccttacacattggtagcagatgtgcagcttggtcttcttcatgtggcccctaacagttggatcaggggctgcttctgaatatgttgcctgccttggattcccctccccagctggaccgacggtcaggcctcagtgggagaagatgtgcttagtcctgctacaacttgatgtgccaaggcaggcgggaacccaaggaggccacatctctgaggagaagggaaggggtgatgggcatagggatttgtgggactgggagtggggtgggtgggtgggtggagaccagaatgtaaagtgaataaataaattaattaatagaaaaaaatcagtcaatcaataaaaaggcagaaggaagaaacaaaaaagtggggtttgtggggataggggaccaagaaaggcggcttcaatccccagttcctggcaatccggaggctgaagctggaggaacaggctgccacaccctataccactttctacaagcttttttgttgttgttgttattctgagttggttttgtttgtttttttggttttagggaaaagatgcagattaggcatttcaaagtcacactctttgcaaactagaaacacaataaaaaaaaattctgggcttgattggcctcctggcttctgttcatggcctcttttgtgtgaggcacaagactgaaggccctgtctttgtcatgtcaactgcactagccgggttaagtgcagattcttcccaaggtcgtagcccagttcagtctggtttgttgtgatccagtactgtagcttaaagcaagacagtggtgcttgtaagtatgttttaaaactctttttcctggacaagcgaggcttgaccacttttaggaacatgttggttatgactttaaactttagaaaaaaaaaaagtcatgtagcaaagggtagccatagctcaccatagctgtggatacttttgaactcaggatcctcctgcctgcttccctagtactgggatgacatggttgtgtcacctgcttggtgcttgggatgcagccacagagctgtagccctaggacagtgcttatactatgcacaaagcttcccatttctttatctagcaagtgcttagaggttttgaagcaggggaagtatggtcccatctagtcaggacactcccttgagcccaggagtttgaggctgaagtgggtaacccagactcttattgctgtataacagcccaggctggggagatggtgcagcaggttagactcctgccaccaagcctaaagacctgagctctatctcaggcctcacaccaccagtgtgaaggaagcaggttatccttgaccccctccataaattaatgagcaaggaatgaacaaataaaagtacatgagaagaaatggccagaatttaggagtcagtcccagccggccctcagggtctctcctgccaggtcacatgacaaaccggctctcctgcagagagagtttcctctagctgccctcaggactccagcccccacaaccctccacctccccacccctgctgggagaactttaatttcttggaccattgtttcaataacaactgaaggaaaggcaaaggcagaaaggccaccggagagccagagttcaagtccactctcaattgtagagcaagtcaggaggccagagtgagcattgagacaccccagctcaaacagaagagagaaagaggggggcatgggagtgaggggaggtagagctccatggctcagccagcaaaggcacttggttgcttgctaaggctggtgtcttgagtttgatcccacgaacccacatggtagaaaggagagactccagcaagttgtcctccaagttccacacgtgcatgcaagtatgcacatgataaataagtgtaagaagaaagcagaaacagcctacaccccatgggtatatgaaactcattttgccagctaggtgcagctcatgattggtacatgtgtgcctgagagcagggctctcaccataggagtccccccaccaccaccccacctcaggaaagtcagtttgtagcaattgttcagccataaacatcagcttccacagaagcaacaacagatgggcaagagctgcagggtcctttcctggttctaggtcctgagataggatgtcctgacttctgcaggctggaggtggggtggggatgggggctctaccttgggcctcacatcacctcgctgctgtcattttcccttagtcttgagtgtggggatcagaggacacctgtgggaagttgttctttccttctatcatgtggatcctctgcccagtgcacctcaccagcctctcatgacatttccacacatatggaacaggctttggtcatactcattccatcaccctcacctgcccgccccctgcccccctcccaggctggcctcgaactcagaaatctgcctgcctctgcctctgcctcctctgcctcctcttcctctgcctcccaagtgctgggattaaaggcgtgtgccaccagcgccctgctctgtcctcttctatagtgcatatgtgcgtgtgtcccaaagggctgaagaaaataacgctccttcaacatctctcagcatgtctgtcatgctcagagatgggcaagcctcctgagcccctttatgaaccatgatggagtgtttgaagtgtcgatgcaggtgatcacagctgacaggcattcaggagcacaagggctactgtgtgtcatacctggaaaatagccatcatggttctccctgcacccccctccacgtttgtgtgtgtgtgtgtgtgtgtgtgtgtgtgtagaccaggctagcctcagactcacagagatcaatgtgagttgtccatgtgctggaatataaggctaccatgcccacctggtatgactctggttgaaatcagaataggggtgaaaatagggagcccctacctgttgctttctgagtgatttcagcctcacaggtgatggagaccaaagatggtcaggtcccctgtgtattctgggatctgaccattcatgtgacccagtactctagaggttgggttgtctaaaaccaggatgctaactttaatggctgaactaggagacttcccgctcagggcacagaggccactgtccttctgtggcatggctgggtagcatcatggtttgtcatgacttccacggtggttatttttgtagctgacaatgagacttactggaactggcttggcactcaggcttagaaagcgcctgcatttaaccttgagctgttggaacacataagcctcagagcccatggcctttccacagcttggcccagacagtcactctaagggcttcgatgcagcaagaaggagccctcccaagactgaatgtggtggagccctggtcttccactgtgtctgcctgtctgccctcatcttcccagggtcctgagccccctgcccctgcgtcctcagccacagggaaagatgttctttcccactttccctttctttccctctttttcaagactgccgatagaacccagagctttgcacatgctggggctgcatcctacttcccaatccagcagagcacagactccaaaaggcatcacagagcacacctacccctttggggctgggggctagagtaagttgcagggatgccctgttgttggctggtgggaacaggctccgctgctgtggccaccagctcttgagatgacaagccatcccctcacagactcacggatgactcagaacgatcctcccagcccctggcaatatggcctaagtcactccggggccatgctgaggaaatgaggcatcaggatgtgtttgaggttttggggttcaactgaactgctctgggaatatggagagttttgttcccatagcccaaggggatggttctgggtccgtgttagagccaaagacaagaacaaagtcaccccagctcctagtctcaggattttcccatttcactctggaacaacatagaacacaaaggctttggttgctgactgtttctcttgatcttgggacagtccccaaaaggccaacctgaggttaaggttgaaagcaaggttgattgaaatgaagagccatagcaggctgtataggagcctgct

SEQ ID NO: 1057 - DNA, 3131 bp, Mus musculus
ctccggaggccgagtccgcacgaagatggcggcgccgcttgtacccctctcgcagcagattcccggtggaaatccgttatacgagtcttattacaagcaggtggaccctgcctacacagggagagttggggcaagcgaggctgcgctgtttctgaagaaatcggggctctcagacatcatcctggggaagatatgggacttggcagaccccgaaggtaaagggttcttggacaaacagggtttctatgttgcactgcgactggtggcctgtgcacagagtggccatgaagtcaccttgagcagtctgagcctcaccatgccaccaccaaaatttcatgataccagcagcccactgatggccacacagtcatctgcagagacccactgggctgtgcgggtggaggagaaggcaaagtttgatggcatctttgaaagccttctaccagtcaatgggctactctctggagacaaggtcaagccggtcctcatgaactcgaaactacctctggatgtgctgggcagggtctgggacctcagtgacatagacaaggatggacatttggaccgagatgagtttgctgtggctatgcacttggtgtaccgcgccctggagaaggaaccagtgccctccatcctgcccccgcccctcatcccaccctctaagaggaagaagactgtgtttgcaggagctgtgcctgtcctgcctgctagtcccccacccaaagacagcctccgctccacaccatcccacggcagcgtaagcagcctcaacagcacaggcagcctgtccccgaagcacagcgtcaagcagccaccagtggcctgggttgtgcctgtggcagataagatgcgctttgatgagatctttttgaagacagacctggaccttgatggctatgtgagtggccaggaagttaaggagatcttcatgcactcaggcctcactcagaaccttctggcacacatctgggccctggctgatacaagacaaacgggcaagttaagcaaagagcagttcgcactagctatgtatttcattcagcagaaggtcagtaaaggcatcgaccctcctcaagtcctctcgcctgacatggtgccaccctctgagagaggcactcccattccagacagttcaagtactctggcatcaggagagttcactggtgttaaagagctggatgacattagccaggagatcgcacagttgcagagagagaaatactcattggaacaagacatcagagaaaaggaagaggcaatcagacagaaaaccagcgaagtacaggaattacaaaatgacctagaccgggaaactagtagtctgcaggagcttgaggctcagaaacaggatgcccaggaccgcctggatgagatggaccagcagaaggctaagctgcgggacatgctgagtgacgtgcggcagaaatgccaggatgagacccagacaatctcatcattgaaaacccagattcagtctcaggagtcagacttgaagtcccaggaggatgacctgaacagggccaagtcagagctgaatcggctgcagcaagaggagacacagctggagcagagcatccaggctggacgtgcacagctggagaccatcctcaggtccctgaagtgcacacaggatgacatcaaccaggcaagaagcaagctgtcccagctacaggagagccacctagaagctcaccggagcctggaacagtatgaccaggtgcctgatggggtctctggtaccagcctgcctgacctggccaccttgaacgaaggcatcttgctggcagagaggggcggctttggagctatggatgatcctttcaaaaacaaagccttattgtttagcaacaactcccaggaacttcatccagaccccttccaggctgaggaccccttcaagtccgacccatttaaaggagctgaccccttcaaaggtgatcctttccaaagtgatcccttctcagagcagcagacagcagctacagacccatttggaggggatcctttcaaagaaagtgacccattccacagctcaagcagtgatgacttcttcaagaaacagacaaagaatgacccatttacctcagaccccttcacaaagaacccttccttaccttcaaagctcgacccatttgagtccagtgatcctttttcatcctccagcatctcctcgaaaggttcagatccctttggaaccctagacccctttggaagcagctccttcagcagtgccgagggcttcgctgacttcagtcagatgtccaagcccccaccttctggccccttctcctcctccttgggaggcacaggattctcagatgacccctttaaaagtaaacaggacactcctgctctgcctccgaagaagcccgctcctccacggcccaaaccgcccagcggtcagagtacacctgtaagccagctgggttcttcagacttccctgagtcccctgatccattccagccactcggggctgacagcggcgacccgttccaaaataaaaaggggtttggggacccatttagtggcaaagatccatttgccccttcctcttcagctaaacctcctaagacctcttcctccggctttgccgacttcacctcttttggcaatgaggagcagcaattggcttgggccaagcgggagagtgaaaaagcggagcaagagcggctggcgaggctgcggcgacaggaacaggaggacctggaactggccatcgccctcagcaaggctgatatgccagcctaggtgacacaggggaagccgcagctgtatgtacacatcccttcaagttgtgccatgccacagccaaggacagctggccacagggcctcaggctacagggaccttgttgagaggcctcagacactgctcacccctgtgggtgggccaggaaggcagctataggtaaaagtcctggaacctgccagtctctgaggtatgatggtgatcagttaggctcttccttccaatcattcagtggctgacagagaaggcctccagtctcctagctgcagacaagctccacccccagcccttccttgcatccacaagacaccccacacacatgatgtatgcattcgttgtataaaaatgaagtttgaatgattaatataaaatattttaatac

SEQ ID NO: 1058 - protein, 897 aa, Mus musculus
MAAPLVPLSQQIPGGNPLYESYYKQVDPAYTGRVGASEAALFLKKSGLSDIILGKIWDLADPEGKGFLDKQGFYVRLVACAQSGHEVTLSSLSLTMPPPKFHDTSSPLMATQSSAETHWAVRVEEKAKFDGIFESLLPVNGLLSGDKVKPVLMNSKLPLDVLGRVWDLSDIDKDGHLDRDEFAVAMHLVYRALEKEPVPSILPPPLIPPSKRKKTVFAGAVPVLPDPPKDSLRSTPSHGSVSSLNSTGSLSPKHSVKQPPVAWVVPVADKMRFDEIFLKTDLDLDGYVSGQEVKEIFMHSGLTQNLLAHIWADTRQTGKLSKEQFAMYFIQQKVSKGIDPPQVLSPDMVPPSGTPIPDSSSTLASGEFTGVKELDDISQEIAQLQREKYSLEQDIREKEEAIRQKTSEVQELQNDLDRETSSLQELEAQKQDAQDRLDEMDQQKAKLRDMLSDVRQKCQDETQTISSLKTQIQSQESDLKSQEDDLNRAKSELNRLQQEETQLEQSIQAGRAQLETILRSLKCTQDDINQARSKLSQLQESHLEAHRSLEQYDQVPDGVSGTSLPDLATLNEGILLAERGGFGAMDDPFKNKALLFSNNSQELHPDPFQAEDPFKSDPFKGADPFKGDPFQSDPFSEQQTAATDPFGGDPFKESDPFHSSSSDDFFKKQTKNDPFTSDPFTKNPSLPSKLDPFESSDPFSSSSISSKGSDPFGTLDPFGSSSFSSAEGFADFSQMSKPPPSGPFSSSLGGTGFSDDPFKSKQDTPALPPKKPAPPRPKPPSGQSTPVSQLGSSDFPESPDPFQPLGADSGDPFQNKKGFGDPFSGKDPFAPSSSAKPPKTSSSGFADFTSFGNEEQQLAWAKRESEKAEQERLARLRRQEQEDLELAIALSKADMPA

SEQ ID NO: 1059 - DNA, 136786 bp, Homo sapiens
gtagtcccagctactcgggacgctgaggcaggagaatggcgtgaacccgggaggcagagcttgcagtgagctgagatcgggccactgcactccagtctgggtgacagagcaagactccgtctcagaaaaaaaaaaaaaaaaaaaagagatgggagtctcagaacttctaggctcaagcagtccttccacctcagccttccaaagtgctgagagttttgtttgtttttttgttttaatgctttggtgatcccagctgggctcagtggctcatgcctgtaatcccagcactttgggaggctgaggggggcagattgcctgagctcaggcgtttgagagcagcctgggcaacatagtgaaacttcgtctctactaaaaatacaaaaattagctgggtgtggtggtgcgtgcttgtagtcccagctactcaggagggtgaggcatgagaataacttaatcctgggaggaatcacttgaacccaggaagtggaggttgcagtgagccaagatcgcgccacggcactccagcctccgcaacagagtgagacttcacttcatctcaaaaaaaaaaaaaaaaaaaacagagcgagactaagtctcaaaaaaaaaaaaagttttggtgatcccgatgtgcagccacgtttaaggaaccagtgccttagagggaaaggatattctagaaatgggtttaagcaccacctactattctaattgctgttatagtatacactactgagcaaaatacaactgtttctttttgaaaagttgttacatatgtcacatcaataatgaaggcctagtagccagggacagtatggctcacgcctgtaatagtcccagctactggggaggctgaagtgggaccatcacatgagcccagttcttttttttttttctttgagactgagtctcactctgtcacccaggcgggagtgcagtggcacgatctcaactcactgcagcttctgcttcccgggttcaagcgatcctcccacctcagcctcccaagtagctgggactacaggcatgcacgaccacacctggtaatttttgtatttttaatagagatggggttcaccgtgttggccaggctagtcttgaactcctgacctcaagtgattcacctgccccagcctcccaaagtgctgggattataggtgtgagccactacgcctggccaagcccagaagttcaaatccagcctaggcaacatagcaagaccccatctctaaaaaataaaaaatgtcacctgagcttcatgtatttccaaaggaaaaaagaaatgaaaaataaacaaataataaagaataaaagcataataatgaaggccttattttcatctgcaggtgagatctggaaccatttttgataactttctgatcacagatgatgaagagtatgcagataattttggcaaggccacctggggcgaaaccaaggtatgaagcacgtgattaactcttcctacatcactatttcatttgtgtaaattttttttttttagatggagtctagctctgtcacccaggctgtaatgtagtggcatagtctcggctcactgcaacctccacctcccgggttcaagcgattctcctgcctcagactcccaagtagctgggactacaggtgcatgccaccacgtccggctaatttgtgtatttttagtagagagggggtttcaccatattgctcaggctggtctcgaagtcctgacctcaggtgatccacctgccttggcctcccaaagtgctgggattacaggagtgagccactgtgcctggccccatgtaaggttaatattggcaggttccagggattaggacatgaatttttttttttttttttttttttgagacggagtctcgctctgtcgccaggctgaagtacagtggcgtgatctcggcgcactgcaacctccacctcccggttcaagcgattctcctgcctcagcctcccgagtagctgggactacaggcacctgccaccacacccaactaatttttgtatttttagtagagacggggtttcaccatattggccaggatggtctcgctctcttgacctcatgatctgcctgcctcggcctcccaaagtgctgggattacaggtgtgagccaccgcgcccagccaggacatgcaatctttacaggttcttcttattcagcctatcctaggtggtgaggaggcttctagaaggcagggtctgcctgagtactgacatgcatttggccacatggaagcataacccctggcctctggggctttttttgttttgttttgttttgttttgttttgagacgggttttgctctgtcacccaggctggagtgcagtggtgccatctcgactcactgcaacctccgcctcctaggttcaaatgatcctctcacctcagcctcccgagcagctgggactacagccacacaccaccacgcccagctaatttttgctttttttttttttttgagacagagtcttgctctgtcgcccaggatggagtgcagtagagtgatctcagctcactgcaagctctgcctcccaggtttaggccattctcctgcctcagcctcccgagtagctgggactacaggcgcccaccaccatgcctggctttttttttttttgtatttttggtagagactgtgtttcaccgtgttagccgggatggtctcgatctcctgacttcgtgatccctctgcctcggcctcccaaagtgctgggattacaggcacgagccatcgcacccggtggggcttatgttttttctttctttctccagggtccagaaagggagatggatgccatacaggccaaggaggaaatgaagaaggcccgcgaggaagaggaggaagagctgctgtcgggaaaaattaacaggcacgaacattacttcaatcaatttcacagaaggaatgaactttagtgatccccattggatataaggatgactggtaaaatctcattgctactttaatctatgtttcaaactcaaatgtctacatggcactttgtccaattttctttgaacagtgtttcatgcttctgggtggggtaggttgtatctcccctggtgacccccttgcactgagaagttccctcttgacaattttacacgctggaagccagaggccagcaagggtctggccaaaaccatgatccccttttcttaactcccaaaagtctttttataaaataaaagttgaccaggcagtgtgcctcacgcctataatcccatcactttgggaggctgaggtgggcggatcacttgagcccagagttcaagaccagcctggccaacacagtgaaaacccgtctctactaaaaatacaaaaagtagctggatgtggtggtgcgcacctgtagtcccaggtacttcaggctgaggctggaggcagcctcaacctcctcagtagctgggactacaggcgcccgccaccacacccggttaactttttgtattttaagtagagatggggtttcactgtgttagccaggatggtcttgatctcttgacctcgtgatccgcctgccttggtctcccaaagtgctgggattataggcatgaaccactgcagccagccatattttttgttttttaatttaatttttatagggatgggagtctcacatgttgcccaggctggtcctgaactcctggactcaagccatcctcccaccttggcctctcaaagctctgggcttacaggtgtgagccactgctcctggcccagtcttcttctggaagaggcccataatcatactgaaactcatgatgaaaataatcaaatttgtgacaccagaaatttggaatctagtgatgttatgaataagccaaataaattggaatttatatacagaatattgagagttgaccagtgtgggccgggtgcagtagctcacacctgtaatcccagcactttgggagactgaggtgtgtaaattgcttgagtccaggagttcaagaccagcctgggcaatgtggcgaaactctgcctctacaaaaaatactaaaaattagctgggtttggcggtgcacacccgtggtcccagctattcgggaggctgagatgggaggatcacctgagcttgggaggtggagattgcagtgagctgagattgtgccactgcactccagcctgtgtgacagaatgagaccctacctcagaaaaaaaaaaaaaaaaagagaaagaaagaagaaaagaaaaaaaagaaagttgatcagtttcaaaagcctggctgggaagtgaagttctgcagaattttgctctcactctggtcaatgttggcagacctttgcacctggattttttctgatggtggctacatcaaccttcaccaattattagggattgattattactctgagaaactaaagactcccttcctcctaatgcaagggtggcaaacattgcctacctctttcacctctgaacagggtgagtagtgtgaaaagaatcagaggcagacctggagagaaagtgctggtaccaattagtgtacaaaggtgagtcaggccaggtgtagtggcttgtgcctgtaatcccagctatctggggggtcaaggagggagggtcacttaagaccaggagtttgagaccagcttgggcaacatagagaccttgtctctaaaaaaaatttttttttgtaattagctgggcatggaggtacatgactgtggtcccagctacttgggaggctgagatgggaggatcgcttgagtccaagaggtcaaggctgcagtgggctatgatcgtgccactgcactccagcctgagtgacagagcgagaccccctctctaaaaataaaataaagtggagctaacaagacaaaaaacggtgagtgagactggctcaggctctgaagattcgttgggagcagcgttgtccgagagaatttgtcacatgttgctttttttgtttgtttgtttttgagacagaatcttgctctgttgcccaggctggagttcagtggcgcgagtatggctcactgcaacctctgcctcctgggttcaagcgattctcatgccttagcctcccaagtagctgggattacaggcatgcgccatgcccatctgaattttgtatttttagtagagatggggtttcgccatgttggccaggctggtctggaactcctgacctcaagtgatctgcgtgcctcagcctcccaaagtgctgggatcacaggcgtgagctaccatgccgggtcacgtgttgctattgagctcttgaaatgtggctagtgggaccaagaaatgactttttaatcttatttcattctagttaacttcactttaaactttgttagaggaaaaactctggacatattaaatttcatggagtgtaactgagcaaagaacaattcataaatcaggtagctgccagagcaactccatcttgaataggggcttagtaaaataaggctgagacctactgggctgcattcccaggcggttaaggcattcttagccacatgatgagataggaggtcagcactaaagaccttgctgataaaacaggttgcagtaaagaagccggctaaaacccaccaaaaccaagatagtgatgggagtgacctctggtggtcctcactgctacactcccaccagcgccatggcagtttacaaaggtcatggcaacatcaggaagttactgtatatggcagcctgaaaagggggccgggcgcggtggctcacgcctgtaatcccagcactttggaaggctgagatgggtggatcacgaggtcaggagatcgagaccatcctggctaacacagtgaaaccctgtctctactaaaaatacaaaaaaattagccgggcgtggtggtgggtgcctgtagtctcaactactcgggaggctgaggcaggagaatggcgtgaacccgggaggcggagcttgcagtgagccgagatcgcgccactgcactccagcctgggtgacagagcgagactccgtctcaaaaaataaataaataaatacataaataagtaaaaagggaaggcatgaataatccaccccttgtctagcatatcatcaagaaataaccataaaaatgagcaacctggccaggcacagtggctcaagcctgtaattccagcactttgagaggccgaggcaggcggatcacttgaggttgggagttcaagaccagcctaaccaacatggagaaaccccacatctactaaaaatacaaaattagctgggcgtggtggtgcatgcctctaatcccagctattcaggaggctgaggcaggagaaccacttgaacccaggaggtggaggttgtggtgagctgagatcccgtcattgcactccagccctggcaacaacagtgaaacttctcccaaaaaaaaaaagcaaccagcagcccttggggctgctctatgaagtagccattcctttattcctttactttcctaataaacttgctttcactttactgtatggactcgcactaattctttcttgggtgagatccaagaaccctctcggggtctggatcaagacccctttgcggtaacagtacaaagggtctgattgtgagaagtggcagggatcactggaactccacttcagatcccatctggatcatcaaaacatcaaccctaaataaataaattcaggaaatatggttaaatatagagtttagtttagcacaaaagtttgaggacggccaccctggaacacagattccaaagaatggaaatcagcattccaaactgaggaagtttgggggtcatttatataggtaaggtttgggaagcttgacagcgtttctacatatttcacacaaggcaagtacatagttaacagtaatctgattagtcaaggcagtggtctttttgggaagggtatatttaacattcacatagaggacataacagtcacaggaccttttgcactatctggtctgatttaggtgcaagataatagaggaaaggtcagcaatgaagaagggcgatcttaacgctgatgccatttagtcttttgaaatgaatctacagagcaagaacaggagagttaatctataatctataagcagaagttgtagttacatgctgtctggctcagatcacacagtcccgttttcttcaaggctcaacataattcttagggttcaaaagtgtatgattaagtttggattttttttttttttttttgagacgaagtttctgtgttgcccaggctggagtgcagtggcgcgatctcggctcactgcaagacccgcctcctgagttcatgccattctcctgcctcagcctcacaagtagctgggactacaggcaccccccaccatgcccggctaaattttcgtatttttagtagagatggggtttcaccatgttggccaggatggtctcgatctcctgacctcatgatctgcctgcctcggccttccaaagtgttgggatttcaggcgtgagccaccacgcccggcctttttttttttcttttttttcttctgagacggagttttgctcttgttgcccaggctggagtgcaatggtgcgatcttggctcactgcaacctccccatcccaggttcaagcaattctcctgcctcagcctcccgagtagctgggattacaggcacccgccaccacgcctggctaattcttgtatttttagtagagatggggtttcactgtgttggccaggctggtctcgaattcctgacctcgtgaactgcctgcctcggccctccaaagggctggaattacaggtgtgggccaccgcgcccagccaagtttggattatttttacaagatgatgctggagagtttctatggccaccaccattctagactctgatactggcacttaaagcctgcatgctacatttcctggacgccgttgccaattggcaacgttcctgtcatgctttattagaacaaagttgggaggcagaaagaggggagaaaccattttttcagacttctgccagtggcttaggtggtggtgacaacaacaactgtgactttcgcaatcatggtggaggcaactgtggctagcaagggtgaacacatctgggatccttctgtaggcacagtgattgtgggttatgggtcctcctgtgctttatttatttatttattttgagacggagtttcgctcttgttgcccaaactggagtgcagtggcgtgatctcagctcactgcaacctccgcctcccaggttcaagtgattctcctgcctcagcctcccgagtagctgggattacaggtgcccaccaccacaaccggctaatttttgtatttttagtagacacgggatttcatcatgttggccaggctggtctcaaacttctgacctcaggtgatccatccacctcggcctcccaaagtgctgggattacaggcgtgagccactatgcccagccacctcccctgctttaatctttcagctctagagaggctagcagcctcatatagttatgaatctttaggtaaacttaccttcctcttttgttcttccagtacttccaacacttttatactcagtcccctgtagtcgtttatgtattcatttatttttatttatttattttttagacagagtctcgctctgtcacctaggttggagtgcaatggtgagttctcagcttattgcaaccttcccctcccaggttcaagcaattctcctgcctcagcctcctgagtagctgggattacaggcacctgccactgcactgggttaatttttgtatttttagtaaagatggggtttctccatgttggccaggctggtatcaatctacctgtctcaactggattgctgggattacaagtgtgagccacagagcctggctcaatcccctgtattcaatatcctctgtttgaagtacctagaaggacttctcttttccttatggaatacgtactgataaagcactcaagactgttaaaaaccttcattactctattgatgtaacaaaagaagctgaggcaaagttaatataagtagagagtttgggccaaggttgaggaccgcagtccaggagacacagattcaagttgccctgaatgtatgctttgattagcaacagttacaagtgggttctttttgtttttgactttgttttgagacagagtctcactctgtcacccaggctggagtgcagtggtgcaatcttggctcaccgcaacctccacctcccgggttcaagtgattctctggcctcagcctcctgagtagctgggactacaggcatgcaccaccacacctgctaatttttgtattttttttagtagagatggggtttcaccatattgatgtttcaccatactggccaggctggtctccaactcctgacctcatgaccctcccacctcggcctcccaaagtgctgggattacaggtgtaagccactgtacctggcaacaagtgggttcttgtcttatttatttatttatttttgagacagagtttcgcttctgttgcccaggctggattgcaatggtgtgatcttggctcactgaaacctctgcttcctgggctcaagcaattctcctgcctcagtctcctgagtagcttggatttcaggtgcccgccaccacagccaggaggacgccttgcggggcagggtgaggggggcagggtgcgggtcccccaaattagcgcgcacacacacacacacacacacacacactgcgatcctaggaacagggcgctttgcggggcagggtgagggtcccgaccctccgcggggtgggcgaccgcctccccaggcgcactggcagggggacggcatccctaacagagaaccaggcctcggcatgggctggagggatgacacagcatggtcgactcggacagcggccagcggcatgagagtccgaacaacgttggaaggaggagtaggggaacgggcaagagagcacggaagacgcagatgcctcaggcccagcccctccaggctgcgtgtgtgcggccccgcccctgcccccgcccctcccggcctgactgcacatgcgtggccctgtctacggccccgccctctcccgggacaggcggcctgcgcaccgccctcccgtcgtcccagtgcgcacgcgtggctgcagccccgcccccgttcccccggcgctcggagcccgagtccgcgggaagatggcggcgccgctcatccccctctcccagcaggtacgggccgggcgggcctgggggcggcgccggggtgcggggcgcgaggcgagcggtgcggcgaggctgaggcgctgggagactcagccaggcggcggcgggggcggcgcgtgctgaagggcttgcggcgggcgggtgggcaggcggccctgaaggtgacaggccgggacccgcggcctcccgtgcccgagcgaccctcgcgggcaccggcgaggcgaggaggtgcgcagcgcgtgtcctctccgcccagggcccggaccctgccgccgctgaagctcccaggccggggacccgcggaggcgctgggctgcatcccggaggggtgggcgaggggtgcgagcgtttctgtcggcgcggcggcccagcgagtctttgtctccctccggtcccggcgcccgggcgggcagggtcccgccggagcccggacccgtcagcagcagtgcgatctcagactgatcccctgcctccttggaagctgcttccgccacccctgcaccgggcgcagatcgtacgtctccgggcgcctctctgtgtcctcaaattcgcctgatgcgcttatgaaggggcagtatcgatagcgcgacacagacatgcgaaaaagagccatgcgtaggcagctctgttatttgggagagactttcattcattcattttctatccatccctcaaatgtgcgttgggtcaggtgctgggagcgctgcattcttccagacagacaaggtcgctgctttcctggaggtgacactcgtgggaactagaaactacctgtgttatgctaatcacagctgcctttatttgctgaatacctgtgttgtgcaaagcaccatataagcattttgctagaatgatctagcacagcatggtgattaagagtgaggacacagggtcagatcatgtgttcaaatcttggctccagccccgatttctctgtgcctttggttgaagctcttagccattccacccatcagttgcttcctttggaaaatggagatataaaaatgtgttgggattatgtgaaaattaagcacgtgaaaaagcgcttagaacagtgcctagcatatgagaggcactcagtgatcctataattactgtcatcatttaatctctgccagatttggacgtttgggagtagagaccgcagcaattaagaattccaaacccaaagagagttgataggccggttgcatgcttgcatgactggttagctgatccaaggagagagaagtgcacagctagccaatttgcaacactgtcactaagttaacagtgctaaaacccggtgattattaattagcaagttcttgttactgacatgaaagtgctctgtaaactgttaagtgtcctaccgataataggtgttaatagctaagtgctacagtttagagtatgtagtcagggggtggggggcggggaaggcgggagtcgggggaaaatcacctaagatcatttcatgagaaagcactaagcactcccagtttgggaggcgtggatctttctaaaacttcctgtccaatttttttttttttgagatggagtattgctctgtcacccagggtggagtgcagtggcatgatctcagctcactgtaacctccgcctcccgagttcaagtgattctcctgcctcagcctcctgagtagctgggactacaggcacgtgctaccacacccggctaatttttgtattttttttttagtggagacggggtttcaccattttggcgaggctcgtgtcaaactcctgaactcgagtgatccacccgccttggcctcccaaagtgctgggattacaggcgttagccactgcgcctggccaggtcactgacttcttagcctcttcctgttcctttccctatacatttgttgaatgaaggcgtggcctggttttcttcgtttggaaatgtcagcacttctttacacttgctctcgagtgaaaatctacaccatgggttactgttggcccaggtgtgaggcatggccctcccaggcccttactgtctagctcaggagatcacttgggttcacagataactctgggggaaccaagggtataattccaaaatttttggttgggggcaaaagggaagcaccctgcagcaggtggctgtgatctggttggatttaggtgacagagcacacttggcaagcagatggccaggtgaaggtgagcaaagtggataacccagcgggctagcctaggggaggaggggtgtgttttctccaccccgactcctgtctgcacttttcccatcagcatctttttcagtctgttctgtactccatgacatcatctcagaatctccttccttatatactcttttctgaccctgaatatcaacgtaaattcgaaaggtctgcacctctgcctctttaggagtgatttttttttcccaacagcatctcagtgatttgtgtgtctccctgtccccctgctcagctctcttctgctttccaaaaagccttccgtggaaatgcatccagatctctttcctccttgtactccccgaggttaccggtggcccctccgtccttaaccccggtgccctgtggctgcagccgatcctcctcgaactccgcaacactggagcccgtcggtcttcactcttcatcctctctcctttcagtctctccttcttgtcccctaatttcagcctccctacctgcatcttatctctctgtgcgctccctcccctggagcttctgtgcagaggacttcaaacctgccttctagagtccagaaggtgtctctctcctgcacctctgccagcctgctggactctggaatgggccatttccttgccatgccccaaagtggtctgggccatcctacttcctacttgcccactccctcccacttaatcccacgccactgtggaagtcatctttttgatttttgagacagggtctcgctctgtcccccaggctggagtgcagtggtaggatcatagctcactgcaacctcaaactcctgggctcaagcaattctcccaccttggcctctcaagtagctgggactacaggagcgcagcaccaatcatacccagctaattaaacaattttttttttgaagagatgaagtcttgctatgctgcctaggcaggtcttaaacccctagcctcaagcaatccttctatctcagcctcctaaagtattggaattacggtgtcagccactgcatctggctaggattcatcttctaaaacatattcccctgttccaaaaacctttcacagctcccattccccttcctccaaaagaactcagtttatggctgggcgctgtggctcatgcctataatcccagcactttaggaggctgaggtggatggattgcttgaggccaggagctcgagaccagcctggccaacatagcaaaaccctgtctgtactaaaaatacaaaagttagccaggcatagtggcaaacgcctataatcccagcaacttgggaggctgaggcacaagaatcgcttgaaaccaggcggcggaggttgcagtgagctgagatcgcgccactgcaccccagcctgggcgacagggtgagactcagtctcaaaaaaagtcagctttgatgaccttagtaagccctgaatcgactccacctaaccttgctgggtccctttcctgcacttctggctcttggcaacactttctagcctcagcatccttagctgtgttgctccggttgctagaacatcactgtgagctcctgccgtatgctgcctgccctgaaggacggtctttgaggcctcccctgtgttgtcctcccttagccccacccgaatgagagttctctcccttgtaccttccgtgggtcccttttgtgaccgctgtacctaggaagcgcgtggtaactgggctcagtgatgaggagagactgccctgggcccaaagagctacaccttcctcctttcccccttgttatgtgttcttcatccaggagcttttgctgtatttcagtaggtgcctccattctaggaggcttttattccccttttacaagtgaggaaaccaagacccacagaaatagagtaacttgctgaagtctcatagttggtgggcgcagagctgaggtcacacctgcgtcctcctgccgcagagccctgctgttccagatggcctgctgggcacctctcccagagcagcacccggccagtgtgtctggaatgaatgctgagtggctcggacacttacttgtcctcttgtcccttgtttcttttcttcctctgaaataagtgctagtctatcttagtagaatgctaatggcaatgcagtctaaattgatgagaacgaagttttagagtaaaatccactcctgaaagatccagaattccctgactgtcacttattgacctgcactggcctgttttttttttgtttttgttgttgttgttgttttttcgactaaatagattctccctgggcaagacccctccacctccattctgaactttaaaacaactttccaggccgggtgcagtggctgacgcctgtaatcctagcactttgggaggctgaggcaggtggatcacctgaggtcaggagtttgagaccagcctggccaacatggtgaaacctcatctctactaaaaatacaaaacattagcctggcgtcctggcggacgcctgtaatcccggccactcgggaccctgaggcaggagaatcacttgaacccaggaggcggaggttgcagtgagccaagatcactccactgcacactccagcctgggcaacaaagtgacactacgtctcaaaaaaaaaaaaaagaaaagaaaagcaggcaccatcaggtgcagtggtgcctgcttttcaatgtttaggtccttagatgtttgtttggattcccagatattccttcactgccctcagtcctgcaaatactttctgtaccttagttttctcatctgcagaatggtactgtggactcgcttgacctgctttgtcacagtagagtgtcaggaccctgccgtgtgacgcatgtgctctcagtgctttccttttttttttttttttgagacagagtttcactcttgtcacccaggatggagtgcaatggcgctgtcttggctcactgcaacctctgcctcctggattcaagcgattctcctgtctcagcctcctgagtagctgggattacaggcgcccactaccacacccagctaatttttgtatttttagtagagatggagtttcactatgttgcctaggctggtctcgaactcctgacctcaagtgatctgtctgcctcagcctcccaaagtgctgggattacaggcaggaggcaccgcgcctggccctcatgcctgccttttgtagatcacactgttcgttcagtgagtatttatttggcatcttctttttgctggacactttctgggcagtggatggaacagtgaatctgaaggcagtgccgcctcacggggctgacatcgttgggaggggcccagatataaagaaatgagcccaatgtgtagtgcattcggtggggattgatgctgtgagatgagtagagcagggcaggttccgatctgatgatggaggtcaggaaaggtctcaccaccaggctggaaggactgagtaaagaaaacatcatagattgcctggttcatcctcccggtcactctggccagtattatcttcagtgtataggggcaagaggggcagatcactggaggccaggaagggcagatcactggaggtcgagagttcaagaccagcctggccaacatgctgaaaccctgtctctactaaaatacaaaaattagccaggcgtggtggcacatgcctgtagtcccagctcctcaggaggctgaggcaggagaattgcttggacctgagaggtggaggttgcagtgagccgagattgcaccactgtactccagcctgggtgacagagcaagactctgtctcaaaaaaaaaaaaaaaaaaaatagataaagtgaggccagagattgttacgtcccttgcccaagtttgtacccagtgagctcaggcagacatggcttttctgacacaggttcaggcctcttcattgcaccatagtttcttgtcttggaaagttatttttttgtttgtttgtttttaagtttatgacatctcctaacctcatttgtttttatacctagttattagatatcatgtagtctgagtttttattttattactttaatctcatctcattaaaaggtagagagggacatggaaaggcctgcttattgtcttcctttttcctttagagacaggctcttgctctattgcctacgctggagtacagtggtgcaatcaaagctcattgcagcctcgactcttggcctcaagtgagcctcccacctcagcctctcaaggaactgagactacaggcatgcaacaccacacctggctaatttttaatttttttgtagagacaggatcttgctatgttgcccaggctggtttcgaactcctgacctcaagtgatcctcctgcctctgcctccaaagcgctgagattacaggtgtgagccaccactcccagccagttgtctttaggagaatccaaaggtttccctgccagagtggtaatcagtgctcctggcccatgcagaattgagttgtccaggcccggcccacagcagaggctcaggtcacgggtggtccaagctgcaggaggggcagatgactggcttccatttgggtgttggacatggttgtatggaggagagggcgtgtttggtgtaggccaagcttgtccaacccatggctgcatgtggcccaggatggctttgaatgcagcccaacacaaatttgtaaactttcctaaaacattatgaggttttcttgtgaattttttttttttttttgagactaagtctcgctctgttgcccaggctggagtgcagtggtgcaatttcggctcactgcaagctccgcctcctgggttcatgccattctactgcctcagcctcctgcgtagctgggactacaggcacccgccaccacacctggctaattttttgtatttttagtagagacggggtttcactggttaggcaggatggtctcgatctgaccttgtgatctgcccgccttggcctcccaaagtgctgggattacaggcgtgagccaccatgcccacccgtgaattttttaaagctcatcagctatcattagtgttagtgttagtgttagtgttagtgttagtgttagtgtattttatgtgtggcccaagacaattctagtgtggcccagggaagccaaaagattggacacccctggtctaggccatggggaatagcctttcacacggaggcaaagaggactgagccagagctgagaggctgcaggtctaggtcaaagggccaaaacatgcggctgggactttggggttcatgtccttcctttaatttaggcagctcagggatgagaggaggaaggtcttttggtaaataagacgtgagagtttgtgtctgggctacaaatcggccgaactgacaggatgtctgcttgccgagagagtggccagtggctggtgggggctgaggagctgagacctgcccactgtccttcgcgctggactgggttttaccgctggtcagagtggtggccctgaagtttgctcctgcatggagtgcagaccattagctcttaaagcttctttgggcttttcccttcataggagtcccagctcttgatactacaagctttggggtgaaagtaaaggtcacagatgaccacagacatttgtctcggatttccatctgcactgcctgtggtgtggaatgtagacctgataacagaatctgtttactgactgcctgcaggtcaggctgacataaagtcacttctcctcctcttgggcacaccagccaggctggatcaggcgctgctaccggcagctgacagcacacctgctccccgtgtttcccaggcctgcagtcctcattccctctgctctgtggccccctggcccctctttctgtcatctgcgcaggcgatccttcatcttgcctcaaggcgtttgcatctgctattccctctctctggaatgctctttccaaacccttcatcctctggtgaatccctacaccttttcatatcagctggggcatcacttcctcagggaagcctttcctgacaaactggcccagcatctctgttaccactggtggagatggacaccttttccatttagccgtttataattttctctttgcggggttgattgatggtctgtcttccccaaccacctagactaggtccacaagggcagagactgtgcctgttttattcatccttgtttgccaggctgcagctggcactcaggtgctcaacaatcatctgttgagggaagagtagcatgggccacattatgagaggcagtagggagctatggcaggttcttgaggagtgacacctttagatgatctggctgcttacacagggagtgcttggagctgggttctagctccgagacagtctctgtgatatgggcatgaagtgatcaagaggaacctggcctgaggttgtttcaggaagagtagaaagggctgggggtgaaaggaatatgtggggtagctgtttggacaggtgagggtctaggtgggagaggaagcagggggaagaagcaggcatagtgtctgcaaccgtcaggttgaggccaccttcagggagccaggacagcagcagtgggagtgcctggtgggcagagcctggtgggctgtggctgtgtcagttgagtcaaaacccatcactttgcaggaaaccctccaagccacgtgagaccccacatttaggtacagtcaaaaagaagaccagctctggggctggggcaccatgagattctgtctgctgagctactgtgtgctgtcttgggaccaagataaataaaaccgagccccaccctccaggtcagctcaactgcagctgggcacccaggcacacagaaaattaggacatagtgtgacacactcgtggaagtcaggtggcacccacagcggtgggatgaatcacctccactgggctgggaataaaggacaggaggaagagggcgcctgtgcctccttttgtcttttccctcctctgttccaacaggcctggaggaagcagctgggtgcagcctctctgactggctgtacactgcgtggaccagtgtcctgcccccaccctttgcacaggccctgtctcccaccaccatcttcacagcttcctggccccctctctgccttctcagagtcccacttccctgattctttgttttactttattttttcttgaggtggagtcccgctttgtcacccaggctggagtgtaatggcatgatcttggctcactgcagcttccgccatctgggctcaagcaattctgcctcagcctcccaagtagctgggattacaggtgcacaccaccaagcctggctaatttttttgtatttttgtatttttagtagagacagggtttcaccatgttggccaggctggtctcgaactcctggcctctagtgatccacccaccttggccccccaaagtgctgggattacaggtgtgagccaccatgccctcccccccacttccctgattctggtaacctggtctcccagaacaggtggcaacgggaccccagccctggtggtaccctgactgccctcaccagtgagtgggcccaggcaggcagctctgggccctggggagagatttggggcacaggtctgatgcaggagtgagggaatgttgtgggaccaacaatggtgccattgtccctgtgcttgtttctagatgaggaaactgagagggagagaggtaaaacaactggtcagacccccatggagaacaggcgtctgaatcagaccatgggctccaaagccaccattttgtcctatgattgccacaccatgggctccgggagggtcgaggagctctgtctttcctgctccctgctgggttcccagcccctgaaatctgggctcctggcacatagtaggctggtgatatctgttgattggaggctgggtacttggaacagcagccaggagcgcagtctgtctctccagctgtctttgagggtagttgacagaagggaacgttttgtctcttgggtgaagaaacaggcacagggcccagagccgcctgctcgagcccactggccggtgacagcagtcagggcaccaccagggctggggccctgctacctcctcacctccgctcatcagagggtgaggaaagggctttcctcttgtgtaagtgacatcaacaagtgtgcctctgtcattacgccaatctgtagaaaactggcttttctttctttctttctttcttttttttgagacagagtctcactctgtgacccaggctggagtgcagtggcgcgatctcagctcaccgcaacctttgcctcttgggttcaagtgattttccagcctcagccctccgagtagctgggaccacacgtgtatgccaccacaccctgccaatttttgtattttttgtagagatggggtttctccatgttgcctaggccagtttcgaactcctgagctcaaagcgatccacctgcctcggcctccgaaagtgctgggattgcatgtgtcagccactatgcccagctggcttttctttctttctttttttttttttttttaagagacggagtcttgctctgtcgcccaggctggagtgcagtggcgcaatctcggctcactgcaagctccgtctcccgggttcatgccattctcctgcctcagcctcctgagtagctgggactacaggcgcctgccaccacgcccggctaatttttgtatttttagtagagacggggtttcaccgtgttagccaggatggtctcgatctcctgacctcatgatccgcccgcctcggcctcccaaagtgctgggattacaggcgtgagccaccgcgcctggccccagctggcttttcttaatctgaagaggacgtgcttttcaattttatattttccagtggaagagaaaactatctcatttcacactctccaaaggggaaagatgaaacacgaaaaaacttgatgatgaggccctcacactgagcgtgtttaaccaggactgtacggttatggggatggactgtccccctcaattccccccacaccctacaaatggcactgtttgtggttggggggtcccagacacgattggcctaggcgcatgttcttgcaaacgttcttccctttgagttttttctttgctgagaactagaacgctctgtgcccgcggcacccccgtgctggctttggaaactttctctgtgggtcgaggcttctggagtggaggagcaggctccacaattgctgatgggctgggcaaggttgtccatcaccagggtgcaaattgttgctgttattttgcttgctcacaccaggccatggagttggcattttcttttaggccagcctctgagttggcatttatagtcagttgactttattgatttaatttgttgttgttgactcttagccactagaaaatgtcctttaattcacatttaatgcacatttaaaatgtcctttaattcacactaagtgggtttttacaggtgtgtacttatctgctgtgtgtaaaattgtattttttttaagaaaatgacagctgagactaagagaattggtgaaacactgttctttttttatttttagagacaggctctgtcgcccaggttggagtgcagtggtgccatcacggctcactgcagcctcagactcctgggttcatcctcctgtctcagcctccttagtagctgggactgcaggtgctcctcagcacaccaccacgcccagctaattttctgatttttaatttttgtagggctagggtctcactgttttgcccaggctggtcttgaattcctgaccttaagggatcctcctgccttaatctccaaagtgttgggattacaggcctgagccaccattcccaaactgaaatattgttctatcctagatgttgggagctgcttagctgttgagttgagagagcaaatggctaccatatgtaccatagtgtagccaacatttgttgaaatactttattgcttggcaaagatcaattggcagggcaggctataaggactgtgattttacacctgcaactcacgtgctgattcacagccttgcctgacctccctccccgcccaccattctttgtaaatacggcctgctcccctgtctcaggaataataatacaagagtaaccataataggggatgtaataatggcttcccattgcagagtgtatttcacttgcatattctcatttgggacttaccagcatcctcaggccaggtgctgtctattctcattttacagatggggacactgaggcccagggtggcttggtggcttgtcctcactgctactgagccacagagctatgtctgcccgctccccactaccaactgcaccttcctgcactcagcccaccacctgcctccctcaacactttaatctcacccatgccctcaacagacatttactgaaggcctgcttctaggagggcacagcgtgatccctccaccctccaggcattaagaatgtagtgagaggggccggtcattacagcagcttttccatcaaatcaacttcaggaagtgtcccttgtcaaagtttggggctatgggagtgtggaggcaggagggacttatttcatttgggggaacctagggtcatcttagagcagggcgttggcctgcagcaggcagcggccccaagcatagggaatgcagtcacgcaccgcataaccatgatggactgcatatgtgacagtgctcccgtaagattatactgctgtatttttcctgtgcctttgctatgtttagatatgtttagatacgcagctacttagcattgtgttacagttgcctgcagttttctgtaccgggccacgctgcccaggtttgtagcctgggagtaataggctagaccacagcccaggcgtggagcaggcgctgccttctaggtttgtgtaagttcactccaggatgtcctcacgacgatgaaattaacctgacgatgcaactctcaggacgcatccctgtagttaaacgatgcatgactgcatcttgtgccaagacaaggagtgaaaggtgcccgatatgttcagtagagctctgccagccgggggaaggaggtgagacttgagtgtgatatatgtgagtgtgagtgtatgtgggtgagcctgagtgtacatgtgtgattgtgtgtatgtgtgtgtggctgagtgtgtgtgagtgagtgtgtgtgtggagtgaaatcagcccggcaaggtaggagatggccagggagcactttcaggactgggctcagggcttggaccttagcctccgttacacaccctgaagagcctttctgagcagaggagtggctgtgtgcgaggtgcagtggggaagcgggtgaaggcagggccgtgggtgaggaggctgggccaggctctgtagaggcatgtatggggcaagcggggtgggggcggggcggccctcccatcaggacagagcccctgtccttgtccttgtcacccctgctgtgcatttgctcttctgtgttggtgtgtgtgtcagctcactggctttgatgccctgactatgatgctccatggtggcagcaaccatctttctgctcactgtggggtccgggagcctcgaggggtgcctgatgtttagaggggccagaaaaagaacagtgcactaggaggctgacgctgtcacccacagcgatgaggaggaaggtggcatggcactgacctggccagtgcaggggatcttggcgtccttggcagggagccaccccccactgtcaggaacaccccgacaggaggccagacccatcccaaccgagtcctgggcagtgtgctctgttagggagtagtagatggcagggacattggagcccaggagtagctgatgcaggaaaggaatgttgggaaggcccggggtacactttggaaagttgggagactctgggaagtgggcccttgtgggaggcggtgggtgttcctgctgcggaggacacactgctgagtcattgagcccctctcggtgttcccccctcccccccagtcttgggtgactgctctcccatgtctctccagggagaccgctcatgggtcagaggaaggaaacagatggaactgaataggtctgttctctgagatgcccgggaggggtgatgtccaggggacacaggtcagcagctgggagggctgctcagaggcttcatctgcttttgctcttaagcagcgttttcaggagggagggctggaatctgttcccctcctgcccgggcgccattccagttccatcccttctgccctctgcatggctgcacaagacccttgagcccttccctacacgcccgcccctccatccctccaggacccagctgccctggtatttcctgtggtggagcctcctccctccctccccgtggcaagcctgtctctggcactgctttggtgcgggtgctccacagcctcgcttgactgagtctccctggacaggctcagccatggagggggggccttccaggtctcctggtgccctgggtgtatgtctgctgctggctgcggactggccctccatcctgtctcttccatctagctcttggcagccgtctctgtgctttgtcacagctccatgaggctgtgggtggggaatgtcccgttgttcacctccacacctgcaccaaggtgtctagaatggcaattagatttccacctcaatgcccctggggacatcccaaggaaacacattcgtttttagggaactggcatgtcctccttctccgggtgtctgcattgtgagtcgctgcagtccccaggctgctggagttctgctgctggagggccatggcagtctctctctgatcacttccttccagccctgctccttgcagcggatttctgccgtttaccatctcatatgcatatgcgcccaccttgctggcctgcaggcaccccctccccatgttctgcttgccctggggatgacatcctgtcttttcagcacagcgtgcacagaccctggcatcctatgcacatgcccttccacctgactggggccgtgctgaatcacccacagctcacctgtcttctctgtcccggtgcacacctggccccaagccctgagttcccctcactgtgcctactgctgcagtcatatcatgcggtcccctgtgccatagtcctgggctgactttgtcccgcctgcccttcctgaagcccaggactctattttttgtttgttttgtttttgtttttgttttgagatggagtttcactcttgtcacccaggctggagtgcaatggcatcatcttggctcactgcaacctctagcctcctgggttcaagcggttctcccgcctcagcctcccaagtagctgagattacaggtacccgccaccacgcccagctaatttttatatgtttagtagagatagagtttcaccatgttggccaggctggtctcgaactcctgacctcatgtgatccacccaccttggcttcccaaagtgctgagattacaggcgtgagccaccacgcctggcctgaagcccaggactctgtcctacacacttttgtatcctcagtgctgcctcttagcacgagttcagcatgtgttgattgagtgagcaaacaaataaatttccaggtccaaagaagggagagctggggaatccaagggtggaccctttttcaggagggttttttgtttgtttgtttgagacagggttttcctcttgttgcccaggctggagtgcaatggcacaacctcggctcgctgcaacctctgcctcctgggttcaaatgattcttctgcctcagcctcctgagtagctgggattacaggcctgtgccaccatgcctagctaattttatatttttagtagagacaagatttctccatgttggtcaggctggtctcgaactcctgacctcaggtgatccacccgtcttggtctcccatattgctggaattataggtgtgatccactgcgcctggctttcaggaggttttatgcgaagggtggggggaggtcagtagctggaggtggaagagagatggagggatgtttctggggagagggtacatttttacctggagccagtggaaggagggcgatgaggaggataccaggaatcacaacagccggtgattgacaagtccccgggggtgggagtgctcaccctcatctccagatgcagaagctgaggcacagagaggctgctcgtcctgccccagggttgcacagcattccagcagcaggacaggactcaaatccacatttgtctggcagcactgttgacctccacatgagacagcttctcttagtgaagcaagatgggagaacacagcccataggtgtagatggagctgggcagtctctcctgaagacgtttagggctcagcatagtcctgcatcctccacagggcagtgcatcgaggcaggaagcctgctgcaggcaatgttttttctccagcagttctgtttctggaatgctgagtttggtgctcatgcctgtaatcccagcactttgggaggccaaggcaggaggattgcttgaggccaggagttcaagaccagcctggcaaaataatgagacccccccaatctttacaaaaaaaagaaaaaaaaaattagccacacatggtggtgcatggctatggtcccaattactcaggaggctaaggcaggaggatcacttaagcccaggaatttgaggctacagtgagctatggtcgtgccactgcactccagcctggacaacagagctgtctctctttttttttttgagatggagtttcgctcttgttgcccaggctggagtgcaatgatgtgatcctggctcactgcagcctctgcctccctagttcaagcaattctcctgcctcagcctcccaagtagctgggattacaggtgtgcgccaccacacctggctaattttatatttttagtagagacaggcttttaccatgttggccaggctggtctcaaactgctgacctcaggtgatccacccaccttagcccccaaaagtgctggggttacaggtgtgagccaccatgcctggcccagagctgtctcttaaaaaaaaaaaaaagaaaaaagaaagctttcaaaccttgattctgtgttctgacgaccttcctggtccatgtcattgaccttgctgctttgctgcatgtctaaatgctcggggcagttctcttgcttgttggttcctctccagggcagcgactgtaggccttacccctgtgccatgccccactgtaggccctgagttctgtctggtttggatggaggccttgagccccgagcatgttcgtcttctgctggtctcacaaggcactcatttgggtccctggggagaatccatgaaaattccttcagatcctgcttttccttgcacatctttctatttctgtctaatttacaaaagcagctcatgctgacatagtacaccagggaacataggaagccatgaggaagcaaactagctggcccgtagaaatcctggtaagcatggccctgtcccgccaggttccagtagcggggcgataggataccgtgtgcttataagccaggtcacacactgcacctgctagattgcccccttctcatttagcaagctgatgaagattggaccccatttgtaaacattctgctgttttgatggctgtaaggtatttattctgtcccatggagactcagcaatttattagcagcttaaccagtcctctgctgtttccagtgccttgcagtctgcatctgtgccctcaaggggggaaaacagcgaaccctcttacccttcccccactcctgcatcacttctcagtctcccaggagcagaccttgtagccatggtagggcacacttgtgtgtgttctaaaggaatgccagtttgtattgtttcacagaagcacgatcctgtcaccaagctctcctcatttgtcacacttaaacctgacgcagcttgtgccattagggtccttgccaaggcagaagcacatcaaatggccttttttttttttttataggaattcttttttctttcttggatttcagctttttttattgtagatacagagagtacatgtgcatatttgttacatgagagtattgcatgatgctgaggtttggaatacggatcctgtcaccctggtagtgaacatagtacccgataagtcattttttttttcttttttttgagatggagtctcgctctgtcgcccaggctggagtgcagtggctcgatgtcggctcactgcaagatccgcctcccgggttcacgccattctcctgcttcagcctcccgagtagctgggactgcaggcgcctgccaccacgctgggctaattttttgtatttttagtggagacggggtttcaccgtgttagccaggatggtctcgatctcctgacctcatgatccgcccacctcggcctcccaaagtgttgggattacaggcatgagccactgtgcccagcccaaatggcctttaaacacattaaaagttgatggctgggcatgctcacacctataatcccagcaccgtgggaggccccggtgggaagatcttttgaacccaggagttagagactggcctgggcaacaaagcaagaccccgtctctacaaaaaataaaaaatagtaattagctgggtgtggtggcatgcacttatagacccagctacttggaaggctaaggaaggaggatcccttaagtccaggaggttgaggctgcagtgagctatgatggcaccactgtactctagcctgggtgacagagcaagtctctgtctctatgaaaaataaaataaagcccgggcgcggtggctcacacctgtaatcccagcactttgggagaccgaggcgggcagatcatgaggtcaggagatcgaggccatcctgactaacacggtgaaaccccgtctctactaagaaaaatacaaaaaaattagctgggcatggtggtgggcacctgtagtcctagctattcgggaggctgaggcaggagaatggcatgaaccggggaggcggagcttgcagtgagccaagatcgtgccactgcgctccagcttgggggacagagcgagactccatctcaaaaaaaataaaaaaataaaaaaataaaatagatgtagagggaagggtttaatgaattcccatgtacccactgcccatttacaacagttatcaatattttgcagatttctttgtaccaccctttgatcttttcccccacctacgtatatttttagttcttaggttttttttttttttttttcagatgacattttgctatgttgtgcaggccggagtgcagtagccattcagaggcccagtgatcatagctcactgcagcctggaattcctggcctcaggcaatcctcctgccttagcttctcgagtagctgggactacaggcgagtgccactacacctggctctggcttgtgtttttttttttttttcgagatggaatttcactcctgttgcccaggctggagtgcagtagcataatctcagctcgctgcaaactctgcctcccgggttcaagtgattctcctgccgcagcctcctgagtagctgggattccaggtgcctgccaccacgcttggctaatttttatatttttagtagagatggggtttcaccatgttggccaggctggtttagaactcctgacctcaggtgatctacccacctcagcctcccaaagtgctgggatgacaggcgtgagccactgcacccagcctcctgttgtgtggttttttttttttgagacgaagtctcactctgtagcccaggctggagtgcagtggcgtgatcttggctcactgcaacctacgcctcctgggtttaagcatttctcctgcctcagcctccagagtaactgggattacaggtgcacgccaccgcacccagctaatttttttgtatttttagtagagacagggtttcaccatgttggccaggctggtcttgaactcccagcctcaggtaactgcctgcctcgacctcccaaagtgctaggattacaggtgtgagccaccgtgcctggcctgtttttttttaatcttagaaattgtaggccaggcgcggtggctcacgcctgtaatcccagcactctggcaggccgaggcgggtggatcacgaggtcaggagatcgagaccatcctggctaacatggtgaaaccctgtctctactaaaaaatacaaaaaattagacgagtgaggtggcgggcacctgtagtctcagctacttgggaggctgaggcaggagaatggcgtgaacccgggaggtggagcttgcagtgagtggagatctcaccactgcactccagcctgggcgacagagcaaaactccatctcaaaaaaaataaaaaaaataaaataaataaataaaagaaattgtatttcaacatgcacctctaacagttaagaccgttttcctttacataaccacaatgccttatcacaccttacacaactaataataacgcctttggtattggtattatctgataacaagaccatattcacatttccctgattgtctgcaaatgtcaccttgcatttggtcattaggtttcctaagtctttaaagaaaaaacaaaacttctcattttgagatgatggtagactcacttgcagttgttggagagtctgggcgggcgcggtggctcacgcctgtaatcccagcactttgggaggccgaggcaggcagatcacctgaggtcaggagttcaagaccagcctggccaacgtggtgagacccggtctctactaaaagtataaaaactagccgggcacggtggtgggtgcctgtaatcccagctactcgggaggctgaggcaggagaattgcttgaacctgggaggcggaggttgtagtgagccaagattgcaccactgccatccagcctgggcaacagagcgagactcttgtctcaaaaaaaaaagagcctgtaccatttatccagtttcctctgaagcaacatttgcataatggtggtacagtattgcatctgggatattgatgatgatggctatgttcaggttctgaaggaagagtcctggattctctggggacccaaatgaccaccttgcgagaccagcagaagttggacatgccctggccaggcgtggtggctcacgcctgtaatcccagcactttgggaggctgaggcgggtggatcacctgaggtcaggagggcgagaccatcctggccaacatggtgaaaccctgtctctactaaaaaatacaaaaatttagccaggtgtgttggcatgcatctgtaatcccagctacttgggaggctgaggcaggagaatcacttgaacctgggaggcggaggttgcagtgagccgagatcgcaccattgcactccagcctgggcaacaaagtgagactccgtctcaaaaaaaaaaaaaaaaaaaaagaagatggacatgcctggggctcacggcctccgtccagcccagacagaactcagggcctgcagtggggcatgacacaggggtaaggcatgcgttccctgccctggagaggaaccgagaagcaatagaaccacccctgagagtttagacattcagcaaagcagcaaggtgaatgacatggactggggagggcatcagagcacggaatcaaggtttgaaagctttttttttcttttttaagagacagctctgttgcccaggctggagtgcagtagcacgatcatagctcactgcagccttgaactcctgggctcaggtaatccttctgcctcagcctcctgagtagctgggaccacaggcatgtgccaccatgcgtggctatttttttttttttgtagagatagggtcttgttgatagccaggtacagaacacgtccctcctgttgcccttttatagccacacccacttccctcccagcccatctcttccttatccccggcaaccaccactctgttcatttctacaattttatcattttaatgatgttatgtgatggaattattcagtatgtaacctttgaggtttggcctttgtcattcagcataattctctggagagtcatccagattattgcatatgtgtcagctgttcattccttttcattgctgagtagtattccatggtgtgcttggaccacagtttgctgaaccactcacttattggaggacatccggggtgttaccagtttggagcagtgacatataaagctgtggccaacactgcatacaggatgtggtatgaacatgactcttcatttctcccgggtaaatgcccaggacagttgctggttcatgcggtagtttcatgttgtgtttagtttttttttgttgttgttgttttaagaaactgccagtctgtttccagagtcaccgtaccttttaactttcccatcagcagtgtatgagtggcccagtttgcctgcatcctcaccagcatttgatgttgtcactatttgttattttagccactctgatagcgtgcagtggcatctcactgtggttttaatttgcattcttctttttgctaatgatgttaaacatattttcatacgtttatttgccatctgctatatttcctctttggtaaaatgtctttttgccttcagatcttttgcccatgttcttttcttcttcgtgtttttttgtttgtttgtttgtttgtttgtttgttttttaagaaatcagatcttgttatgttgcccaggctggtcttgaactcctgggatcaagcaatcctcctgctttggcttcctgagtagctgggactacaggtgtgcaccacgacgcctggctagttttttaatttcatgtagagatggggtctcactatgttgcccaggctggtctggaactcctgggctcaagcagtcctcctgctttggcctcccaaagtgctgggactacaggtacgcaccaccatgcctggcttgcccatgttctaatttgattgttttcttttttatgctgttgaatttgagagctctctagtatatattttagatagtagtcatttgttggatatgtgctttgcaaacctttctttctagtctgtagcttgccttttcacctttttatctggcttttttttttgagacggagtcttgctctgtcacccaggctagagtgcagtggcacaatctcggctcactgcagcctctgcccgctgggttcaagcagttctcctggcttagcctcctgggtagctgggattacaggtgcacaccactacacccagctaatttttttgtatttttagccatgttagccaggctggtcttgaactcctgaccccaggtgatccgcctaccttggcctcccaatgtgctgggattacaggtgtgagccaccgcgcccggcctttctccccccccctttttttttaatacggaattttgctcttattgcccaggctggagtgcaatggtgcaatggtgtgatctcggctcacctcaacctccatctcccgggttcaagcgattctcctgcctcagcctcccgagtagctgggattacaggcatgcgccaccatgcctggctaattttacatttttagtagagatggggtttctccatgtaggtcagactggtcttgaactcccaaactctggtgatcctcctgcctcggcctcccaaagtgctgggattacaggcatgaaccaccacgccaggccttacatggctctttcacagtgcaaacataaagtttgtctgccaatctttccttttgtgaatcgggcttttggtgtcaagtctaagaactctttgctttgccctagatcctgaggattatgttttacatttgaattcatgatccactttgagttacattttgtacgaggcataagacttttagttcgaggcccatgtttttcctatggatgccgattgctccagtgccctttgtggaaaggctttccttcctcctgaaatacttttgcacctttgtcaagaaatccactgggcagatctgtgtgtgtctgtttctcagattctacattctgttctgtgcattactgtctgtgcccgccccctgccaatactccactgtcttaactactctagctatagagtcagtcttgaaatcaggtagactgactctttccactttattattctttttcagaattgttttagcttctctgcctttttttttttttccgaagatgaagtcttgctctgtcgctcaggctggagtgcagtggtatgatctcggctcactgcagcctccgcctcccaggttcaagtgattctcctgcctcagcctcctgagtaactgggattacaggcacctgccaccatgcctggctaatttttgtatttttagtagtgatggggtttcatcatgttggccaggctggtcttgaactcctgacctcaggtgattcacccaccttggcctccctaagtgctgggattacaggtgtgagccagagtgcctggccctgtaatacttaaattactagtgagatggaacattttctttctaactttgctgcatctcttctttctgaattgcctctctctttgctcatttttaattgagatgtctttttccttgtgatttggaaaagctctcttttcacttgccaagtcttctccttctcttggtaacatttaccttagctctgctgtagaaacctctgatggagcagttggagagagctgcccatccagtccaggaaggttagacataccccagcgtttccctgatgccttttgaatgttttgagtcaagtcccagttctgccccgtgcttgccacatgactgagccaggttatctcacccgcagaatgtgggccggcctgctgggagggctgggctcacattgggtgatggttgtgcaaggcctgtgggggcctctaaggggaaggcagaaatggaaggattatcaagcaagctctactccgggctatgtttttgcatccatatgtttttctaagtaggaactcagactgagatgtgtttcagtgttatatgcctaacttcctgcaaaacttggcagtggcattgaaaaacatagccattatggggtctcagctttcctggggaaatggcaggtcatcgaaaacactggctttcaagtccatttatatgctcaaattgagtgttgccttttgacctcttctgtttaataaaatgctccagcacgtcatcacggacgtgcattttcccaggccagcatatgcatgaggctgtcctgtggtccggtgcacagccctgtgacacctgggctgtcattacagggtgcacagtaggtgagggtctgactccaggaccacctatcctgggtgcttcactgactgttgctcattggctgttgtggtcctgagtagggcaaactcagtttccccacctgtcaactggactagtaatattacctgccctttagcgttgtcgggaggatgagaggtactggataggaaacaagggattataggtacttctctgaacattttacagtgaaaatggattgctttccaaaagtcattttgaaccaaggctgatgatcattggtttgttttgcacaagagcgcgtactttgctagcagagtgagagtgagagtttgggcaggaggcagccaggcatgaagatgtaggaggcgtcctgccctcggccacgtgcggggatcagagttgggtgaaccctgcttaggagtcgttagaacacaatcctgagacagtttctcctccgaggtggttctgctgggtttctccatctcaactgctgttgtcctgggttacagttacaggcgcttgtgtgaattgcggtgttttaaagccttcagagcagaaggatgtgaacttgtccttctccttgtgcccctctctctgtcatcccacttgtaaattgtttctgggctggaggataagtgaggaggccacaggaactttgcatgttgtctcttagcattttgagttaggaagagcaactgaaagaccgagctgaaagctacactgaacctcatcaacaattcacacactgcagaggcgaagatggcgtcttctcagcacagtgggctgggtcaggagaacacatcgggtcagctctgctgcacttccttccattcctacggccatcctggtgccacctgcagcctcttacggtgcaggcctcatcccctggtgcgtcccctctctgctgttgcctcgggcttggccccaggctcactttggggtcagacatgggtgggcagctccagaggctgctctcagcatacagagggctctttcccagtagctgtgaatcttccttttgggggccaagaggtctctgcacaggggccagtgacagactgcctggggctggggatttatgtcattagcaacatgtgtcttcagttctgtcgcaatgacatatcagggcagcgtgcaggtgtgagtccattgttcctgggaagaagcctggcataagaggaagtggcagttggggcctggtgctgtaccttctttcttcccccttctgcttttgcatatgcaaaacctgacatatgtgtaattagatcaaaacctctgaccactgtcattgttccaggttacccagatggactcccgtggtgatgagcaatggttgagccatactccctgggctttccctcagctgtaggtcttttgagagtgacatccggtggtcatcaagtgttcgagccggatgagcctttagcatggatgggcagaggttggagctctgggctgtgtccttcagcgactcttctggattagtccaggccttgtttctcttggttgcggatcttgttgctcattagcgcctgggaagtagagcagatatttaataaccctgcatgcctcaaagactgaaactcttttttttccactggaatcacagtagcttggaaacctctttcccttgcttcccatgagattgttaaaaaactcgcctggggctgggcgtggtggctcatgcctgtaatcccagcactttgggaggccaaagcaggcggatcacctgaggtcaggaccagcctggccaatatggtgaaacctcgcttctactgaaaatacagaaattaagtgggcatggtggcacgcacctgtagtcccagctactcgggaggctgaggtaggagaatggcttgaatccaggagtcagagattgcaatgagctgagattgcgccactgctctccagcttgggtgacagaacaagaccctgtctcaaaaaaaaaaaaaaaaacttgtctggaaatgtgcttcagatccagacctctctgatcattggcaggaagggcacctttgtcatctgaagtgagggcctctggagtctgtgaacccatggcaggcgatgtgctgtttgctgcctagacctgaccactgtcacctttactgacagatgacaaacagcctgcctgccttggcctcctttctgtgggtcttcttcctctggggagacatattttggaaataagctggagtttgagcccagaagttgacacaggtgtgatggctggacactgtcatctaacgaggttgtaagatgctaagggtgatagccactccttcctgtacccctcacccaggaatggtgtcactgcctccaagcacgaggggggcagccatcttggggctgctgttgctatacacacttacctcctatgtcttttccatgatgtctttgtctgttttaaaatgatggctcctaaatctctggcttttcttgctttttcatgttattctagttttttctgccttttcagtgtttccccctttcttttcctcttttttttttttttgactttttccctctcccctttcagatctttatgctattttccttctattttcattttgtcatggtagttttctctgtactttcacttcttttttttttttttttttttgagacggagtctcgcaccgtcgcctgggctggagtgcagtggcgcgatctcggctcactgcaatctctgcctcccggattaatgcaattctcctgtctcagcctcctgagtagctgggattacaggcgcacaccaccacacctgactaattttctgtatttttagtagagacggggtttcactatgttggccagactgatcttgagctcctgacctcgtgatctgcctgcctcggcctcccaaagtgctgtttgggattacaactttcacttctttatacattcacaggtgttggcgtcccccagagacgctgaccataatccgggcattattatttttttctttttatttttgagacagagtttcactcttgtcacccaggctggagtgcagtggtacgatctcggctcactgcaacctccgcctcctgggttcaagcgattctcctgcctcagcctcccaagtagctgggattacaggtgcatgccaccacgcctggctaatttttgtatttgttgtagagatggtgtctcgctttgtcatgttggccaggtctcgaactcctgacctcaggtgatctgcctgccttggcctcacaaagtactgggattataggcgtgagccactgcgcccggcctgggcattatttttagcttcaaatgaccctttgtagcacaacaatatgcaagtggtgggtgcgtattggttcaaatccaatgactataactggaaggagtctacgtccccctggttttattcattgtgagaaatcgtacaacagcagtcccagaatttgttggataaacactgtaatcctgcccccaagatagtcctcttttccctgcccagttctattctctttagctgtttacacatccattctgtataattaggtgtcattgtgcattcttcacttttatcgcttattacatcagcggcaggtttgtgtgctcttttttcacctcacttactaaaacaccaacgcacgtaaacttttacagccagcatttcagggactgcataattccccaccaggttggcacactcccctgggtgtccctccccttccctgggagacgtctggcagagctcaggacacagcgggaagtgtctggacttggccgccagccaggctggatccaggtgtggcctctggtggccccgattagctgcgtgaccctagatggggaagtgacctccaaacagcgatgtcttggggctctgaggtgtcgggaaatggaatatcttcagtgccaagctgaggacactgcacttccttccttccctggtgggaacagttactggccagcgctctccgggcgcgggctggtcagtgtgcgtctctgagcactcaggtagctggaggaggatggatgggatggttgagaaccagacccaggccagggaaactggtcgaaagcttgcaggcctggtgatttatgataatgcgtggaaacttcttttctgattccggagccagagaacaatctcagaggatagagtgtcctttccctctgagctctccaggagctgaaatccctttgctcagtgaatggaaattgacactgggctgctgctgctgtttcctgagtgactatattgtttgccctagaatcaggatttattaaagaacattaagcttactttttctaaatcaggtaagcataataatatctgtgtctgaagataaactgaattctgtgttcagaggatgtttaaagtgcatgcattttgactctaactatcatcatatattttggtcatgacaaaattgagggggcaaccctttttttccccaaggggttgtgttcacttttgaccaatatctgtggtttcatttacagattcccactggaaattcgttgtatgaatcttattacaagcaggtaagtttagctgatgtctcttcagatggaactagagcatgcctgagctgaaagcacagtacagaatagaagcccggctgagcggccttttgtccttttctgttcactgtcagcggatagttagcgtggcgggtgccacttcacctgctgctgcatttgctgaaaagttattttgcctcttggtctcccatttcaggtcgatccggcatacacagggagggtgggggcgagtgaagctgcgctttttctaaagaagtctggcctctcggacattatccttgggaaggtatgtgaagatgaatagtgatttctcttctgtggctgccctcacagctccccccgcaggtcagggccagcctgtgcaggcctccttccatggggcccggcctcctgggtagtggcctggtcgctgcagacctctcaggctgcagctggtggatccaaatgcccaggtggcagcccccaccactactttggtagcagataagaaacccgagtacttttggggtcttgatagcttgtggacttttttttttttttttttttttgagacagagtttcgctcttgttgcctaggctggaatgcagcggcgcgatctcggctcactgcaacctcctcctcccgggttcaagtgattctcctgcctcagcctcttgaatagctgggattacaggcacatgctaccacacccggctaattttttttttgagacagtctcgctctgtcgcccaggctggagtgcagtagcgtgatctcagctcactgcaagctccaccttctgggttcacgccattctcctgcctcagcctcccgagtagctggggctacaggcacctgccaccacgcccggctaattttttgtatttttagtagggacggggtttcactgtgttagccagactggtctcgcactcctgacctcaggtgaatcgcccaccttggcctcccaaagtgctgggattacaggcgtgaaccaccgcgcttggccacttgcggactttagttgggggaagaagggtgtcataaacaccattggcttgggagctgagtgcacctggatgtcctctgggccctgccgctgactggctgtgcgcccctgggcagatcattcacctgctctgaattggcttcttcatctgcaggacaacctggggacagtcactcctgccccgcaaggccagtgatggggtggtggcggctctggtttttgttaacacgtggacagtgatcggcagtcatgcttatgagcatttttgtgtttccgcagatatgggacttggccgatccagaaggtaaagggttcttggacaaacaggtatatacacatgtacacagagcaaatggaggggctgggcagagcccccaggctgggtgacctccacggctccttccacattcctccactgtcaagtattactaggcatgagcacggctgtcaaacttaacacgggaagttttcattttgaaataaaggtcttttaaacacttggagccatctttcatggctagtgtatcttttatttatttatttatttatttttcttttaatgttttgtaaccttacatgtgattaaagtgttgtccagactttttattttggaccagtctctcgtggaagttgcacaaatagcttggagggttcctgtgtatcttttgccagctctccccagtgatggtgtcttacataaccacagcacagtgatcagagccagaaaataacattggtgttattttttatttttttgacatggagtctcactctgttgcccaggctggagtgcagtggtgcaatctcggctcactgcaacctccacctcccaggatcaagtgattcccctgcctcagcctctggagtagctgggattacaggcgagaaccatcatgcctggctaatttttgtatttttagtagagatagtgtttcactatcttggccaggctggtctcgaactcctgacctcaggtgatctgcccacctcggcctcccaaactgctgggattatgggcatgagccaccacgcccagccacattggtgttattaatgtaacaaagtagacattggtgtaactttgactaaaggccttaatcagagttttttttttttttttttggagacagagtctaactcttgcccaggctggagtgcagtgacatgatcttggctcactgcagcctctgccctctggattcacaagattctcatgccttagcctccacagtgaaaaccccatctgaaaaaaaaaaaaaaaaaatctgaaatctgaaactcttctgataccaagcatttgggatgaggaatactcagcctgtacttataagtgattttaagtggtcgtagatggccattttgttagaagggaccttgtttgtgctgtgccatgacttgtgatccagtctgtccaggaagcccccttcacttgtacctcccttctttgaggttcatggtgcatgtctgcatgtttgttgttttgtttttttattttttattttttgagcctcgctctgttgcccaggctggagtgcagtggtgcgatcactgcttactgcagcctcgatcttctgggttcaagtgatcttctgcctcagcctctcgtgtacctgaggccacaggcacacactgccacacctggctaatttttattattttttttgtagagacgaggtctcactatgcccaggttggtctcaaactcctgtgctcaagcaatcctcccatcttggcctccctaagtgctgggattataggcatgagccaccgtgcccggcctcatgtctgcatgttaaaagttctgagaattcctatggaaaataaatttgactttgcttaatgcagttcctctaaacttacttaattcctttttctttttttctttactatttattaatttttctcttttctcagaccttgcagggatgaaaggtccccttttctcaaaaccctcttatgatcctctacactctgcaagggcttctgaggacagcaggctgagaaaggccgatcctagcacttacctctttgaagacacttttaaaactgttaacagtatttatagctttaaaagtatccatgttcttaggccagttaataaaaaaaaaaaaaaacagaaaaaaaacaagctaagtgatccctcacaagtccactgagcctttgtgtggtgggtcctgggttaggagggaggcacctgacagcctagttcaacttccttcccgtgtctaggtggggtccacgtcaggccactgggggtgggcaggggatgttccattcaacgaggccgaggggatcgtggtgaaccacagatatgagtttctgaccaaccgtgtgtatttacgactgctttaaaaaaaattcaacacatagccaggtgcagtggctcatacctgtaatcctagctactcaggaagctaaggcaggaggacaggaatttgagaccagcctgggcaacatagtgagatcccacctctaaaaaaataaataaaaacttagctgggcatagtggtgcacacctgtggtcccagctactcaggaggctgaggcaggaggatcgcttgagcccatgagtttgaggttgcagtgagctgtgattgcgccactgcactctgggtgacagagtgagaccctatctctaaaacaaacaaaaattcggcacatatttggtccatcattcgtaaccttaaccatgtttaattttgttgctttatacaacctaacatttcctaaatgttgggagctcatagtttttggaaaatatatgcatctgaaattttacagatttccagatgcagtggaataagtccattttattttattttatttatttattttgagacggagttttgctctttttgcccagcctggagtgaagtggcatgatcttggctcactgcagcctccaccctctgggttcaagtgattctcctgcctcagcctcccaagtagctgggatttcaggcacctgccaccacgcctggctgatttttatgtttttagtagaaatgaggtttcgccatgttggccaggctggtctcgaactcctgacctcaggtgatccacctgcctcggtctcccaaagtgctaggattacagacatgagccaccacacctggccaggataagtccattttagtgtattcatttaagcgatgtccccaaggtgagtccagttcagcccaacgctccaaggggtttttgcacggacggccttcattgttgaagtgcacatcctctttccctgaagcctgctgttagagacagctccccctaccctcactggcgatatgctgtttactccttccctttctttggacttgcagggtttctatgttgcactgagactggtggcctgtgcacagagtggccatgaagttaccttgagcaatctgaatttgagcatgccaccgcctaaatttgtgagtgtccaagtccttcaagttcacattcttctaataccagatgtgtgtgtgtgtgtatgtgcatgtgtgtatgtgcatgtatatttccatgttttctctagccttccccttttattgtggtgaaattcacataatagaaaattaataattttaaagtgaactatttagtggtatttagtgcatttacagtgttgtgtcttcattacctctgtctagctccagaactttttcatccctccgcaaggagaccccatccacattaagtaatcactccttgtctccccctcccagtcgctggcaaccactaattttatttctgtcaatggatttgcctgttctggacatttcctatcaatggaattctctaacatggtcttttgtgtctggcctctctctcagcatcgtgttttcagggttcatccatgttgtagaatggatcagtgtttccatattccatttactggatggaccacatctttatccattcatctctctggacatgtgggttatttccacccttttgactgttgtgaatagtgctgctaccagcattcatgtacaaggatttgtttggacatccgtttttaattcatttgggtcaatacgtaggagtggaattgctgggtcatgtggtgattctgtgtttaactttgtgaagtcttcccttttttgaaagcactttgaaacgtgtatccttttcagcaaacccacccacctatgatttaattctgtgccagccacaaaggaatgtttctctctcttctcagcacgacaccagcagccctctgatggtcacaccgccctctgcagaggcccactgggctgtgagggtaagtgaacgggaatagctccctccttggctctccttcagatagaattgttccagcagttgttctagaattgttctggaattgttctagtttgatgttgttcagaacattttataggatgattgtgtcagctcttctgtctcagtgtgagtggccacagcacttggatgaaacgcctcttctaatgaacaccttttacaaaggctgtggcccttcactggaattgggagttgcctacctggacaactaagtgtcaggagttggattattaaagggctgcagtttaaatcttgcatctttaggtcacattctgtggtttttgctgcttgtgttggttattcagaatagaagaggaaacggtgagagcttgcaagcacgtggacccccaaatgtgtcccttgctttctcgcttctttccagccactttgcatgttaccattctttcctccctgatgttctgattgctttgtgaaaagcctctctcagcacttgaagtgttatttttaaaacagaggatgttgtggctggaaagataagctactgcgtccagaaagaagaaaaaaaacgagggctgtcttctaagtacagaattccttctaaaggaagtgagcatggtccctccaagtaacatcaggcctcctcaccttcccttcactttcagactgtcacatttcctcacgtttatgtggcttaaatcctgacatgaataacactcttgctctcaaataaaggtcccaagcactttcgtcccatgtttacacggttggtttgctcccttcttggagaggtcatgggctgggtgggggtatctgtgcagggagaggacatgaagatatgtcatgtgactgaggagtcatgcagtcacctctgtcatcaagcactttgccagtggcaatcactgtggtgaagggtttctccctgtcacccagcgcattgtgtggactttgaaaaagagctactttgtcatgggaaacagtgccaagagatcttatactttaaaatgtgatggctcttttccaccaggggttatgtccaggcctcactggaagagctgggactgaggggcctggggacctcgcagagaggagtcagggagcacaggaccagatgctgtaattggggtgtactgtggtcgagagagattctgcattccattcacagccacagtcagaaagaacaagcccgaagtgccaagtgtttgtttccgttgtgaacatttctgggcttctgaaggcactgagtcagcaagtccgatggccaggagaggatcccaggcccccgagaaagacctgcagcgctcagcttcttagcaccaacagctgtgaaagcatgcggtgtctgccggtgatctcatctctgtgactgagggctctgtcttggtttttgtcttttaaaaattaaaaaatttttattgtggttgaaagacacatcatgtaacatttaccatcttaaccatttctaagtgtacagttcaggaatgttaagtttcctttggagggtggaacagactggaagccactgcctcactcatggccccttttacgggctgcctgccctatgtctttcagaacagcaggaactgtgactccccatcctaatgctgtaccttccctctgttcatgaagagctattcctatttacgtattaatttatttaccattagaaatggagggcttcctgtatgtggctgggcttggtggctcacacctgtaatcccagcactttgggaggccgaggcaggcggatcacttgaggccaggagttcaagaccaacccggccatcatgttgaaacaccatctctacaaaaaatacaaaaattagccgggcctggtggcgcatgcctgtgatcccagctactcgggaggtacgagtgctgaggcacgagaattgcttgaacctgggagtcggaagttgcagtgagctgagattgtgccactacactccagcctgggcaacagagcaagatttttgtctcaaaaaaagaaaaaaaaaaaaaaaaagaggacttcctgtactttaagttgattttgataattatttgctcaagcactaacatctgctcacacttttgtctttctggtacaagtgggctccttggaggcaggtgagactgatctttgtctccctgcaaagacactgccccaccatgggagactcctgccacactcaggcagcagctaggacgaaggacaagacccggggccagggcctccctcctgaggaccttggctcccagatccgaggttgccataacgttatttccttcagggtatatgttcactttggaaaccaaggggccaagactgttctaagatcattttgtgcttttagccaagggtgatgatgggtccgtggccattttcacttggctttcggtcagagctcggtctggacattcacacaggtgtgctctcctacttactcgggctatttctttccaactaggtggaagaaaaggccaaatttgatgggatttttgaaagcctcttgcccatcaatggtttgctctctggagacaaagtcaagccagtcctcatgaactcaaagctgcctcttgatgtcctgggcagggtaagtgggccacgggcttggttcttctgcactcagtgtccctgctgtgtgtgggcgccactgttctctttccccatggtgcttacaaggctcttgctctgttttctccctgtgccatcaggggctttcatcagcgctcctgtgggtccagccccagctggctcagggcttcctagggtgtggcttacagtgttcacccagtccctggggaaggtgccagaatccttccacttcacagatgaggaggtggactcagaagtgaaattgctgcctggggctttgggaccagtagagctcagtcttaagctccccaacttgggctttccccctttccattgtgctgaatgtgggaatgtgtgtctgtgtctatttatttatttatttatttatttatttatttatgagatggagtcttgctctgttgcctaggctggagtgcagtggcacgatctcggctcactgcaacctctgcctccccggttcaagcaattctcatgcctcaacctcccaagtagctgggattacaggtgcatgccaccacgcccagctaatttttgtatttatagtagagatggtgttttaccatgttggccaggctggtcccaaactcctatctcagattcacccgcctcggcctcccaaagtgctgggattacaggcgtgagccaccacacccgggcttttttatttctttttttgagtttttagagatggggtctcactgtgttgcccaggctggtctcgaactgccaggctgaagccatcctcccacctcagcctctggagtaactgggactgcaagagcaccaccactcctggctcttttctactattaattactctttttcttctgataaagctcaaggtaaaagtattttcaactctgctgcaaatttaggaaaaattttatgcattctctttaaagaaagtcttagcctggtggcggtggctcacgcccgtaatcccagcactttgggaggccgaggtgggtggataacttgaggtcaggagttcgagaacagcctggccaacatggtgaaaccctgtctctactaaaaaaaaatacaaaaattagccaggtgtggtggtgttcgcctgtaatcccagacacttgggaggctgagacaggagaatcgtttgaacccaggaggtggagattgcagtgagctgagattgcaccactgcactccagccagggcaacagagcgagactctgtctcaaaacaaaaacaaaaacaaaaaaaaccctcaatttaggctggtgtggcggctcatgcctgtaatcccagcactttgggaggctggggcgggcagattacttgagtccaggagtttgagtccagcttgggcaatatggtgaaaccccatccctactgaaaaaaaaatacaaaaaactagccaggtgtggtggtgcgtgactgtagtcccagctactctagaggttgaggtgggagaatcacacctgagcctgggaagtcgaggctgcaataagctgagatcgtgccatggcactccagccagggcaaccggattgagactctgtttaaaaaaataataataataattaattttttgttttgttttgttttgtttgtgagacagagtctcgctctgtcacccaggctggagtgcagtggcatgatctcagctcactgcaacctttcctcccaggttcaagcaattctcctgcctcagcctcccgagtagctgggattacaggcatgcaccacaacagccggctaatttttgtatttgtatttgtatttgtatttgtatttatttatttatttatttatttgagacagagtctcgctctgttgcccaggctggagtacagtggcgcaatctctgctcactgcaagctccgcctcctgggttcacgccgttctcctgcctcagcctcccaagtagctgggactacaggcgcccgccaccacgcctggctaatttttcatatttttagtagagatggggtttcaccatgtcagccaggatggtctcgatctcctgacctcattatccgcctgccttggcctcccaaagtgctgggattgcaggtgtgagccaccatgcccagccaatttttgtatttttaatagagatggggtttcaccatgttggtcaggctagtcttgaactcctgacctcaggtgatccacctgcctcggcctcccaaagtgcaaggattacaagcgtgagccaccgtgcctggccaaattaattaattttaaaagcctcaatttgtttctgttaactaaaagtacagttgtcccttggtatacttagggggattggttccagggcccctatcatacaccgaaatgtacgcatactcaagtcctgcaatcagtcctgcacatacaaaagtcggccctctgtatattcgggtttcacgtcccacgactactgtattttgtatccacgtttggttagaaaaatacaagcataagtgagcttgcacagttcaacaaaccatgttgttcaagagtcaaccgtgttttgctttattttgcgtttcattatttttatttttgatgatacataatagttgtagtgtggggtccacgtggtggtttgatacatgcacacaatgtgtaatcatcccagcagggtaattagcatatccatcacctcaaacactgatcctttctttgtgttgggaacattcaaatcttctcttctggaagactctgaaagatatgataaattattgttagctatagttcccctgttgtgctgttgaactttagaacttattccttctggcccggtacggtggctcacgcatgtaatcccagcactttgggaggccgaggcgggcagatcacgagatcaaaagatcaagaccatcctggccaacatggtgaagccccatctctactaaaaatacaaaaattagctgggcatggtggcacactcatgtagtcccagcgactcgggaagctgaggcaggagaatcgcttgaatctgggaggcagaggttgcagtgagccaagatcataccactgcactccagcctgggtgacagagtgagactctgtctcaaaaaaaaaaagaatgtataccttctatctaaccataaatataagtattatttatttatttattaaaaaaaagttttttttttttgagatgaagtctcgctgtcaccgaggctggagtgcactggcaccatcttggctcactgcaacctccgcctccctggttcgagcaattctcctgtctcagcctcccaagtagctgggaacacgggtgcaccccatcacgcccagctaatttttatatttttagtagagatagggtttcaccatgttggccaggctggtctcgaactcctggcctcaggtgatccgcctgccttggactcccaaagtgctgggatggatgacagtcgtgagccactgtgcccggccatgcatacatctttgtatccatgcatctatgcacccatgtccctccgcatccctatgatccattcatctgtgtgtgcacatgcccatgcaatgtatttatccacatctgtgcatgcgtctttgtgcccatatgtctatgctgccatgtccccgtgtgtccatatttatacattcatccgtgcgcacttgcatccgtgctgtcatccatctgtgcatccaggcactcacacatcgtgcatctggtcagtcattcagtaagcatttttcagagcctgcagtggaccatgccttgtgctgggcagtgggaaggtggggataattagataccgtcaaagaagtcaaataagtaatagctaagaggctgagacttatttactgagggcttagtatgggcaggccgggccctagtgctctgcgtgaagacacacatccagcacttgcagccctcctgttaaggactgtgtctcacacccctccaccacccatttttcagatggcgaagcagatcttcagggtggttgggaagtcaccttggttgcacagttgtggaagggtggagaagggatgaggtcctactgtggacagggcggggcagggtccagtgtgcattctggagcagctgtccctagagcctgccctcttcacctgccctgtccattagacacccccacagcatccctgataatcacagtttggcccagtgagggcagtggtggaggggagggcccctgacccactcgagcacggggagcagggcagctggggaagactttctagaagaggtgcccctggtcacatcctccagggtgagggggactctggtagaagtctgggcatgtgggcaacttgagtgaaggcacagaggcctcaggcagtctggcatgccagttagggccacagctccccctggacacttccaccccccaggggacattgggcaatgtctggggacatttttggttgtcacacctgggtcgagtgctgctggcatctggtgggtcaaggccaggaatgctgctcaccaccctgcagtgcacggcatggcccacaccccagagcatgatccagccctaacaggcagtagtgctgaggtggggaagccctgggctgagggaggactgtggagccagaaaggcctgttggagtcctggatccctggtaaagtaggtggaggtccccgtggagtctgtggaggctgggttggggtgcagggacctgctaccgtcaggggctcagcagcagccaggtgacagggccccatctgccaggctgaggagcagggtggggcagggtcaggtgtgtgttctggagcagttcctgtggtagccatagggacaagactgggatagggaggccagctggaggctcttggctgtgtgggctggtgaggcctgagcctcgggcgcagcagcagaggtggagaggaggaccagatgtgagaaacctgcatggactgaagccctggtgattggctggagagaggtgatgctgacacatgaagcatcatggatagagccacgggcatctgcttagatccggggactggcagcctgcccagcgttggcctggcaggcagtgtgcccatccaggaaggctggcatgggtcaggaagctggcagcgtgatggtgcttgagatctgcacgtgtcttaggcacgctccagaacccacgcctgcctgccttctcttcagcgcactgagtggcctgacacctgtctcaccatccactgctggggagtggagacgagacccacagacctgctcagacatgagctcgcagccctgcccagctgagaatgcaagggaggggtggggtttgcaggagtgagcatagggagtgtgggtgtttagggcaacacctgtactcaatcaaagctgtcttttctaagatgtctctgtaagacaataaagaagaaactcagggtaagtttaaagtatagcctttaaacttataatcttataatcaatatgattataatcatgatgattgtcagaccacagatctggtagttgacagtacttcacaggtgatggtttttctgagaactcgcggactggtcctgaaatgtatattgactgccgtctcctgagcccagtgagtgccacggctgagagtctgagttccggcaggtggtctcactctcacccagtccttcctcccacagttacccatgctggtctctcccttgcaggtctgggacctcagtgacattgacaaggatgggcacttggatcgagatgagttcgctgtggtaagtcctgctgtttcctccccacccagcccaggaaggaaatgtgcagtgcgcaggggttgctggattcgtttgtctttctctcttttttcttttcttttttcttttcttttcttttcttttcctttccttttcctttcttttcctttcttttctgtctttctttcttcctttctttctttcactttctttctctctctctctccctccctccctccctccctctctccctctctcctctctctgtctccctccctccctccttccttccttccttccttccttccttccctccctcccttttctttctttctttctttttttttttgtttttagatggagtctcactctatcgccaggctggcattcagtggcccgatcttggccaggatggtctccatctcctgccttgtgatccacccgcctcggcctcccaaagtgctgggattacaggcgtgagccactgtgcctggccttctttctttctttctttctttttttttttgatacggagtcttgctctgtcacacaggctggagtgcagtggtgtaatcttggttcactgcagcctccgcctcccaggttcaagcagttctcttgcctcagcctcccaagtagctgggattacaggcacctgccactatgcccacctcatttttgtatttttagtagagacagggtttcaccatgttggtcaggatggtctcgatctcctgcctagtgatccacccgccttggcctcccaaagtgctgggattacaggcgtgagccactgcacctagccttctttctttctttctttctttttttttgacacggagtcttgctctgtcacccaggctggagtgcagtggtgcaatcttggttcactgcagcctccacctcctgggttcaagcaattcccatgcctcagtctcccaagtagctggaattacaggtgcactccatcacagccagataatttttttgtatttttgatagagatggggttttaccatattggccaggctggtcttgagttcctggcctcaagtgatctgcccgcctctgcctcctaaagtgctgggattacaggcatgagacaccacacccagccttccttctttcattttttaagtgtttgtcttgacatagttctttgtatgtaggaaagtttcagtataggttgagtatccttaatctgaaagtctgaaaccagaatgcttcaagatctgacattttttgagcatcaacatgacactcaaaggaaatgctcattgaagaatttcagattttggatttttggattagtaatgctgaaccagtaagtgtaatacacacattcagaaattcagaaaactccagaactgaaaccctgtggtcccaggcattttggataagggatacgcaacctgtaatacagagaattattttttgtttttgagacagagtcttgttctgtcaccccagctccagtgcagtgacgtgaacacccttgctgcagcctcgaactcaactcaagcgacctccccccttggcctccgacagaaaattcttttgaaaactcttcagtcaaatttcccagtgtcactaatttcctacatttgttttatctttctcctcccttcttcctccctccctccatcactctctcgcccttcccactgctgcacgaagttttcctgtgaaccattttagggttaagttgcagacatgatgcctcttcatccacaaacacttcagtgcgtatttcctaaaaacaaggacttctctcacacataaccattatccacttcaaaatcaggaaattcacatcatagcattgcatttatgatgttttcattatatcctgtatataccccttatattctgtatgagcgtgtctattattatctaatcccaggatattactcagattttatcagttgtcccaaaaatgttccttgtgtctaaagagaacccagtcctgtgtgttacatcctgttgtcttttgtctttcgtttcctgggatctagaacagttcctccatcgctcttcgtgtctcttgacgtggactttttgtttttttgttgtcgttgttctgtttttgagagggagtctcactctgtcatctaggctggtgtgcagtggcatgatctcagctcactgcatcctccacctcctggattcaagcgattctcctgcctcagtcttccaagtaactgggattataggtgcccaccaccacagccagctaattttttttttgaatttttagtagagatgcggtttctccctgttggccaggctggtcttgaactcctgacctcaggtgatctgcccgtctcggcctccaaagtgctgagattacaggcatgagccaccatgcctggtttcaacgtggacattttgaagagcacaggccagcagttatggagtgttcctaggcctgggcctggctgccaggtcctcttgatgacccaggtcatgcactcttgtgagacaggaatcccacggaggtcacacccgccccacatgggcctcccacctgggggaacgtgatgtcaacatgtcttcttactgccatgttgacattcatcactgggtcaaggtgggtcaaggttgtgggttcctgtgggcagttgctctttttccctctgtgctcagttcatctcatgtggggcacgccttgatacggtcaacacccatgactctcagactcttccatgagagttccaccatcgctgatgagtctcgccttaatctggcaagattaattatgatgatggtggctgccaaatggtgatgtgctaatcaaaaccatcattccttgcacttttattagttggccttccacaaggaatttatttctatggctgtggcctgcctcatggatgcatcctcagttccactgttttttgttttgttttgttttgttttatagagacagagtctcgctctgtcacccaggctggagtgcagtggcgcgatcacagctcactgcagcctccatctcctgggctcaggcaatcctcccacctcagcctcccaagtagctgggactactcctgaacgtcttgaagtacaggtctctcttctggtgtctttagacttccaaatccagtactgggaaggtgccagccctggagctggtggcctccctgagtggtgaagggatgcatatggagtctggcttgattggattctttctgtgtgcatttcagtctcgaggaataattcaacacatgtcttggaaagttacacataaaagataactcatgaggaatgatttcttttcactctggtcagcttgggagcgtcctgacagagtgtcctgtcactgcagcccccaaagggctgccctctgccttctcctgatggtcccggccccagccttgccccttcagtgccattgttgtttgcacctgcaggccatgcacttggtgtaccgagccctggagaaggagcccgtgccctccgccctgcccccgtccctcatcccaccctccaagagaaagaagactgtgttccctggcgccgtccccgtcctgcctgccagccccccaccaaaagacagcctccgctccacgccgtcccacggcagcgtcagcagcctcaacagcacagggagcctgtcccccaagcacagcctcaagcaaacacaggtacggagccctcagcgggcacagccccctctcagagcacagtaggatgtttctcgggagttcttaacatgcaaccccagaacggtcaagcttgtgatgaaatgtctttaaaaaatgcttgtggccaggtgcggtggctcacgcctgtaatcccagcactttgggaggccgaggtgggcagatctcaaggttaggagatcaagaccatcctggccaacatggtgaaaccccgtctctactaaaaatacaaaaaaattagctgggtgtggtggtgcgcacctgtaatcccagccactcgggaggctgaggcaggagaattgcttgaacctgggagacggaggttgcagtgagctgagagcgcgccactgcactccagcctgggcaacaagagcgaaactctatctcaaaaaaaaaaagtattcatttatctcattatttcaacatggtctcccctatgttactcaggctggtcttgaactccttggctcaagtgatcctcctgcctcggcctcccaaagtgctgggattacaggtgtgagccaccgtgcccagcctgtgtctgcagagctcttgccaagagttttgaaagtcaggttaggggaggtactttactggcaacgaagctagtggggccaaactcactggtaggcacaggtcacccagcgtcataacccacctctctagtgatcttctggtggttctctcaagaccctctgactagaccgattttaccagtggcccctggtggggtggggtgggagggtatagctcctgcccccacgacggcattggtaggatcacagtcatgaaaacgagcatttctgggggcctacagtccacatgctccccctactccaacttcctcatctccaggccagcaatgctcttgtctgggcctcccaagggccacccgattttgccctcatgccaggtttgagtgaagccacttccagccaccagggtctgatatccttcctttgggacctgtggctgctgagccggccttaaagcccagctgtcactgggagagccagctccacggcaaggctgccccgtgttgggtttatagtcaatttggcatcagaatcttgctgctaacatactctgaggctccagaaatcaggcagtgagttccttttgtttgcccagcaagtattattaggactcttgtcatcccagagctataatttcatacgtaatttcttcttgggacccgtgggacacagaaccccccttgtttctgtgtcccgccacagctcagcttgtctgactcctgttacctctttgtgatccctggcttctgaggttagcttgctgtagctccgtgacttaaaaggcagcaagcccatttctcattagaattcctttattggcatctttacgtccaccagacttgagaaggctcacaaaatttacacagtacaatgccacaagtaaaaatcaggttgctcttgccatctgaactctcatcatttgaattagatccatagattttttttttttaaatatataagagacaggatcttgctctgctgccctggctggagtgcagtggtgcaatcacggctcattgctatctcaacctcctgggctcaagtgatccttccacctcagcctccctagtagctggaataggtggatgccaccacacctagctaattttatttatttatttattttgtagagatggggtcttgctgtgttatgctggctggtcttgaactcctgggcttgagggatcctcctgccttggcctcccaaagtgctgagattacaggcatgagcactgtgcctggcctagctccatggattttgataaattgtttgatcaagtccttgctgtacttcatcacacatacttgctacgtgaaacccctgaactaagctgatctgggtcacatggtatcccttgtttcccaagcttgctttctgatttccctgagttggtatcaggagcctgttagatttggacatcacaggagactcgttcatgaagagtaaacgagtttaaccattgtttcccagtcttgaccatgagtcccttctcctcaatcctatggacatcttcgggttgtcaacactgtgagaactctttgagaaatcccccccccctttttttttccccgagacggagtcttgctctgtcgcccaggctggagtgcagtggcacaatctcagctccctgcaacttctgcctcccaggttcaagcaattctcctgcctcagcctcctgagtagctgggatcacaggtgcctaccaccacacctggctaatttttcgtgtttttagtagagagggggtttcaccatgttggccaatctggtctcaaactcctggcctcaggtgatccacccacctcagcctcccaaagtgctgggattataggtgtgagccactgcacccagcctaagaaatcctttcataactgagaggaatgactttgagtggcagtttcaggcatcatggcgttcattgaaggtgaggagtggagtggcttttctgtacagttgctgcgtggagaaggaacaatcgatccctccagccacatttgcctgtcctttttctctccactccctcatcatctagataattcaatcaggtgtttattctcattgctattatgagattgtttaaaaggagtgatttgtgtaaatatttaaaaaaaaagggaagaggaaaagcacgtctagagttcaggacacagatgccgtgaactgtggcgtggtgggtgtattgaaggcccgcggtaatgcaggtggagtaggccacggaaggggcctgcccctgagtgcctgaggggcctcaatgcctctgaaccaggaggtgaccgggccctggttgacccatgatggcgtttgcctctctcaagttaactgtgagctggtggcgagaggggtcgcacgtgcagcgggtgacccagccccagggctgtgaactttgagctgcactgggctcgtggctccatctgccctggtggggttggggctgcatgaatgttggtggggcctcgtgggtggtggccctcttggatggtggtgtctcatttgttacctgtcagtgacgtgtgtgtactcacaccttgggggtatctttgttgtctcaggagtggggcagggacatagaagggtggtcttcagagtcctgggacaggacactttggctgcctgtagggcagcctttgcgggctgaggagtgggaggaccagggaggctggcatgtggccgggccggttctccagggacggtccttccaagtgggtgctcgggagggtctttcctggcatgcttgaacccatcccctgaagatcacagcctccctcacaccctgggtggcagggtggatggacaaggagagcgggtgatggggtggagagaggtgcagactggcatctgggtgagcttcacagagccagcctcaacctgtctcagcctcagttttgccagttacagaacaaggatcacatctgccctcttggctcatggaagtgaggagagtttgatgccaaatgtgcatggaagtgctttaatcgccccatcatcaaaaagcatgtgtctgggggtcataaaaagcttccagattaactgttttgccaaaaactgtttcagccaacagtgaactgggtggtgcccgtggcagacaagatgcgatttgatgagatattcctgaagaccgacctggacctggatggctacgtgagtggccaggaggtgaaggagatcttcatgcactcgggcctcacccagaaccttctagcacacatatggtaaggccggacaggtggcagttgtggctgtgggtggctccagggggcctgtgggtgaagactgtggagggtggtggtcagggggccccctccagcctgtcacaggcttccgctgtgtctggcgtcctttattctccctggcctgacagaggctgagcaaggtgcacgtgccaaggctcgaagcccgcgctccgtgacggtcagttcactgtctttcagtaggaagggcctctggtccgtcttaagtgctcccaggccatttgcttacacagctgggccctattcttgctggctgtgatgctggctctaacaggaggcctggactttgtcacagccgcctccgggaggtgcgggcagcagggccttggagcctctagcagagtggcctggcagggtgagggcgggggcaggaggccctgctctggaaaggccagtgctttggctcctggcgggagggtgagcacaaggagaccctgtcagtgcctcagagcccagtcgaggagtcggcctcaacccctctttcccccagggctggacacagccgacttcatagggctggggcactcctcttgccactggccagggctgaagtcacttttgagcttgttgctcagagccttgtggccttagagaaggcttcacttgggagctatcaaaaggaaagaattgctggataattctcgagaggcaaatacctccaagtagagcagtgaaattcaggatgttacttagtggcttgggggaaatgactgtccttagtggtaattcacagatgaccacactgtgaggtgggagcctgagaactagctgtcgcagagtcatcacccaaatggccaagccgcctccaactggctagggacagtgggtctcagctgcctcagatccagtgtcccttttagaaaccaacaaaacacagtgtcccctttatgactctgaaaccaacacacatacagttcctggttagcgccctgacaccctgactgtcatgtctaggggtcagtagagggaaagtaatttataatgcatgctgcaattgacacatgatgtaatgacatggaaatgacacaggaaatcactaatccacctggatcaaaagaaggaactcagaggtcattccatgcgggcagcaaaggggaaggaaaggatgatcaggctcttgaataaccatgagaaaagaagtctagatgtgtctgcgagtggctggggcggggcatggcccaatgtagatgacacaccaggagggactgggaggagggggagcatgaagacagaggctttttccctgcgatggctgccaccgtacgggtcagcagagcaggatgtggtgtcagagccggatggccgctgactgagccacccctaagcttgcttctccttctttctctcagaaccttccacaggtgggccttggagcccacactccttgagagatggcaggagcagagaaggggcgggagtggagaggcagctgcagcccacgagcaggctggggcccgcaggggcagactggggagagacagtggcagtatgaaatcgtcagggcctcgaactgtggggataactaggcatttatcagcaatgttctttgagatctgctcattctccgcagctctgttcacggactgcatttgggtataaataagtctgttagaacggtcccagctctcttttggtaaaaggggaaacttctgttgtaatggcttctgccgcagctacacgggaggtgggaaacgaggtccctcgttgagagggcagcatgggtgaaggaagacatttttcatagatgccaaaggccttgtccttactccacaagggtcccttcccttcctggttggctcctcatttttttattttttttttttgagacagagactcactgttgcccaggctggagcgcattggcgcaatcttggctcactgaaacctctgcctcctgggttcaagtgattctcgtgcctcagcctcctgagcagctgggattacaggcgcgcgccaccatgcccggctaatttttgtatttttagtagaggcgggatttccccatgttggccaagctggtctcgaactcctgacctcaggtgatctgcccgcctcagctcccaaagtgttgagaacacaggcatgagccattgcacccggccctggctggctccttgattgtgagtgtcgcggagcctctcacctcagctccacaggaccactgtgtgctgctattcagatgctgccttggcccatctttcaggacatccaagagctatgtgggcaggggacgcttagttgtgggggactgtcctgtgcattgtggccatgcccctgtggcagcctcatttgggcacaagaggagtgttttagaccattgggctgctgtgacaaagtgccatagacagagtggcttagaaacagacatttctcacggctctggggggtggaagtctgtgatccaggcaccagcagatccagtgtctggtgagggctcactgcctagtttgtagacggccacctgcttgccgtgtcctcacatggcaaaaggagcagagagagccttctggggcctcttttataagggcactaatcccactcctgaggctccaccctcatgacctcatcacctcccagaggccccacctcccaacaccatcccattgagggataggatttggacataggaatctggggggacataaacgttccgttcataacaaggaaagagagtcgttgctgattctttcttcatcatgatgacaccccaaagtgctgctgtcatccccattgaaggccagtagccggggccattcagatgacccagagctacagggacaatgcttggtctcagcacccatttccacggaagggctggtctactccatgcctgcagcatcagagcctgccccacgcacgagataagccaaaggaagaggcagctgcatctcagccctagtgaggttttcccagggggtcggctcctcagcccaggtcaggggcttggggttcttcagccctgacagccctcctagggtgggggacactgggagcggggaacccctgggccacttcctgggaaggagatgtgaagtagggaaggagctggggcttgccaccacgccctgccgttgttttcgtcgctgtcgtttttgaaaagcaagggatcggtgacttgggttcaggctgagtcggcgcctgtgatgtgtaattagcatccccacgtttctcccagggccctggccgatacgaggcaaacggggaagttaagcaaagaccaattcgcgttagctatgtatttcattcagcagaaggtcagtaaaggcatcgaccctcctcaagtcctctcgccggacatggtcccgccttcggagagaggcacgcccggcccggtgagtggtgctggtcatgccctgggggtattgacatcccttcccaccgcctgccaccaggtggcactggtggcacacatgagcccacggtggcgggtgctgcctgtggtccctgccttcctcaacaggggcccccgggagggtggcttggctgcccaggtatttccccaggcagggggctgacacttttgctacctcaccctgtgtactaaagggacaattttatccctgggcccgagaactgctggtgcctcctgtcaggtgatgtcaggttgctaattagagatctcgcctctgaattcaattctaggacagttcaggctctctcggctccggggagtttactggcgtgaaggagcttgatgacatcagtcaagagattgcccagttacaaaggtatgttggaaacggcccttccctccacatccagatgttacacgaactctcccaggttgttatcggaaatatcagaggctcacctggaagtttgctcatcacaggtttattcagaaggaaggaaaagatacagcttctgaggtcctaaactggctcaaggggcttgaagaatgacatcttccatttgaatcagcctcagccagagcccgtagcatctgtgtggtctcaggcaggtcttgaccagagcctgtgggtggcagctgtgtggtcccaggcaggtcgtgggcagagcctgtggcagctgtgtggtcccaggcaggtcgtgggcagagcccgtggcagctgtgtggtcccaggcaggtcatgggcacagcctgtggcagctgtgttgtcccaggcaggtcatgggcagagcctgtggcagctttgtggtctcaggcaggtcgcagctcagtagccccaggcatcagcccctccccagtgctaggaaggccttgttatccttgacagctagggcaattgggtctcagatggcgaggagcgggcttaggacccagcagctgaaggtgtgaaggggcctccaggtctgtggctccccttcttgcctagtgccttagtttcctcatgtgtaaacgagggctttggatgggctgtctgtacttttagagtctggtataaagaaatgcagtcacttcctgtattcccctctggatcctcttcaagaatgacatccttttttgttgtttgtttttcagacagggtctcgctctgtcacccaagctggagcgtagtggtgtgatcatggctcactgtagcatctgtttcctaggcttaagcaatcctcccacctcagcctcccgagtagctaggacgcaccaccatgctggctagattttttttttttttttttaatttgagacagagtctcattctgtcacctaggctggagtgcagtggtgtgatctcagctcactgcagcctctgcctcctgggctcaagtgatcttcccactcaccctcccaggaagctgagagtacaggtgcatgccaccatgcctggctaatttttttatattttttgtagagatggggtttcgccatgttgcccaggctggtctcgaactcctgagctcaagtgatcctctggccttggcctcccaaagtgctgggattacaggcgtgagccactgtgccagccagcatcttttttccagtcgattctaggacagggtggactcttgtgatgacggggcaccatgcagaagggcccaaaggtgctttgccctctgtgggaaagagattgtttacttggctgaaaatggaaagggctttgactttcccagggaggatggatcctggtcctagctgggggatccccgggggtcatattaacaggtgcagtattctatcagctcctctggccttggttttgtgctgttagcagagccctgatgagcaaaggcaggttaggtcttggaggggatcaaggtgggtggctggttagaaaacctgagccacggcctgagtcaggcatcccacttcatgttcagtgcagcagatggttcctgttctgtctcagctcctgggggccgtgttatccaaactggcgatcagcaaggatgtgcagcctgacaaggctgagggtgtcttgaggatgcagggccagcatcctagagcctgggcaggcctgagaatcaggaccgggcaggccaaggatggagggagcccctgtcgtgcaagggtcagggtctaggaagggacgctggggcgtgaatcaccccagtgtggcctcagacagccagaagccttgtttccccaatgtggaggtgacaggctggtgtgtgcagagtgcccatctgtaggaggctggggcctgcagtggccccttgagcaggtggctctgagagtggcccttgattcggggagtgtgggctgagctttcctcttatgatttcacactgccataagccagcaagggcatgtcaggtccttcagtttaaagagcactttgtattgtaagtttctgggcttgtggaaatgaatattccaatgatcacttactgtgtgtctggcgacatgtccctgagagggccttattgttgcacaagtcctgggtccctgggcaggaggcagggtctgttagacacatggtgttcctgtccctgaggcagcctctttgggcacaagaggagggtcttagtccattcatactgctataacaaaccactctgaatgggtgactgaaacatcagacatttcgcacagttctggaggctgcaaagtccaacctccagataccggcagatcgggtctgctgaggacccatttgctgattcctggagagtcaccttcttgccgtgtcctcacagggcaaaaggagcaaaggaagctctctggggtccttcttataagggcactaaaccctgggccttgtggctcacacctataatcaatttttcctgttccaagccacccagttggtgatttgttacagcagtgctaggaaatacatgcacgaattctatctcagtttaaaaataaaagaaggctgggtgctgtggctcatgactgtaatccaagtgctttgggaggccaaggcaagaggatcggttgagcccaggaggtccagaccagcctgggccatatattgagacctcggctacaaaaaataaaaaattagccaggcctggtggggcacacctgtggtcctagctactcaggaggctaaggtgggaggattgcttgagcccaggaagtcaaggatgcagtgagctatgatcgtgccactgcagtccagcctgggtgacagagcaagagcctgtctcaaaaaaaaaaaaaaacaaaaccaaaaaaaggccaggcgtgttggctcacgcctataattccagtactttgggaggctgaggcgggcggatcactaggtcaggagatcaagactatcctggccaacacagcgaaaccccgtctctactgaaaatacaaaaattagctgggcgtggtggcacgtgcctgtagtcccagctactagggaggctgaggcaggagaatcgcttgaactggggaggcggaggatgcagtgagctgagattgcgccactgcactccagcctgggtgacagagcgagactctgtctcaaaaaaaaaaaagtagtagttcagacaggctgtcctgggctgtccagggtgtcacaggctgaggtcaaggcgtcggctgggctgggctcttgttggaggctctaggggaagaatctgtttctaggctcattcaggtgttggcagaatccatttccctgcggctgggggtccgaggtctctttttcctttctgaggtcagccagggccactccatgctcctggacactgcccctgttccccctcacgtggcccctccaccttcaaagtcagcaagggcgctctgggtccttatcacacttgggacatctctaacttccacttgggcaaccaggtggagaaagcgcgctgcttttagagggtggttacattgggagcgatccctcccatggtcacaggtcctacctacagttgacggggaagggactgtacagggcgagcagtcgctgggtctcattcttagacttctgccagcacacagaggggcttttgtgggggtgaacagaatcaggccttgggaaggggtggaggcttattattcactcttgttttcatgaaatatttttaaacattcagagagaaatattcactggaacaagacattcgagaaaaggaagaggcaatcagacagaaaaccagcgaggtgcaggtaagggtctcgttcgttttggttacatctactttgtgctaaatgtagttcaggaaaacttccctccctggctggtggtggggaagggcaggggtctgccctggatggaaacatgagctcttgggggctgcagaatgaagtttttgtttttttttttttcaggctgaattcactttatttttcttgtataaaaaccctatgttgtagccacagctggagcctgggtgctctgcatggagactctggtgtaggtcttgacaaggtggtcagtgaactcctgatagggagacttggtgaatacagtctccttccagaggttgggagtcaggtagctgtaggtcttagagatggcatcaaaggtggccttgtcgaagttgcccaggatggcagtgcagcccctggctgaggtgtagcagtcattgatactagccatcatgagcagcttcttggacacaggtgctgagacaatgccagtgcccctgggcgtggggatgagttacaccagcacagagttgcagtggcctgtcaccttgcaagggacaatgtggggtttgctgatcttgttcccccagtagcctctgcacacggggacaatggagagcttggccagtatgatggccctgcggatggcagtggccgcctccttggagcacttaatacccagaccgatgtggccattgtagtccccgatagcaacaaacgccttgaacctggtgcactggccggcgcgggtctgtttctgcactggcataatcttcaaaacctcatccttgagagagccccccaggcaaaagtcaatgatctcagattccttgatgggcgggagaagagatagctctcctccagggacttgatcttcatgtccttgaccaggcggcccagcttggtgatgggcatccactccttatcctcggccttgcctctgcaagctccgtggccttggtcccggctccggtgctgtccacggccgcgaccccagccccagatgccactgctgaaacctccgtggaagttactgtggttgcccatcccagggcctctgacacccccccccccccaccccccgctgcaccggtgtcatccgccattcggtgttttctcggagaagaagaagtttttaaaaatatatatatatatatttttccaaatagagatggggtctcagactcttgagctcaaatgattctcctgtcttggcttctcaaagtgttaggattataggtgtaagccaccaagcctggcgagagtgaagatttttttttctttttttttaaaaatggagtcttgctctgttgccaggctggagtgcagtggcacgatctcagctcactgcaatttccgcctcctgggttcaagcgattcccctgtctcagcctcccaagtagttgggattacaggcacgcaccaccatgcctggctaattttttgtattttagtagagatggggtttcaccatgttggctaggatggtcttaatctcctgacctcgtgatctgcctgcctcagcctcccaaagtgctggaattacaggctaaagtttttaaagttgcttataaccatagacggtggcttctctttttctaaaattgagacaagttggccctctgtatccaagggttctgcatctttggatctaaccaaccacagattaaaaaaataaaaaaataaaaaataatccaaattgatgaaacaatacaatatgataactatttacatagcatttacattatattaggtattataaataacctagagatgatttaaagtatacgaggctggctgtagtggctcacacctgtaatcccagcactttgggaggccgaggccggaggatcgcttgagcccaggagtttgagaccagcctgggcaacacagtgggaccctgtttctacaaaaatatttgcaaaagccgggtgtagtggcatgtgtctgtagtcccagttactcaggaggctgaggtgggagaatcacttgagcccaggagtttaaggcagtagtgagctgtgattgcactactgcactccaccctgggcaacagagtgagaccctgcctcaaaaataaatgaataagtaatatggggtggtgctagggtaggggacatgtgtaggttatatgcaaacactgaaccgttttatgtcacacttgagcatctgcaaattttaataccaatctgaaggatggctatgtaattaatgtcaaatgtgctgtattaaagtgtacatttcagtggtgtttcgcataatcaccgtgttgattaaccatcactctatcgagttagaacctgattgtttctcccgtaggcgccagtaggcccataaaaacatctagccctgaacagtaaatggaaggttactttctgaaagattcatcgttaactgttctctttcagtgagtggaagagtttgacactaactttccattaacccaaaaggaaacctcatccccattaagcagttacttcccattctcccctttctccagcccctggcaactactcatcttttttctgtgtgtatggatttgtacccagccacaatggggcacatttccttcatctgttcctcccatcggggaatatttgggttttcccactttttggctgttgtgaataatgttgctaggaacatttgtctgcaggttttcgtgcgaacacctgtttgcatttatctcaggtacctggagttccggacatttcctgtcagtggaatcatacaacacatgaccttttgtgcctggcttcttccactcagcatcatgtttttgagggtcatccatattgtagcatatattagcgttgaattcctttttatggcagaataatattccattgtgtggatggagcacattttttgttttaagaggcagtgtctcactccattgcccaggctggagtacagtgacacaaccttggttcactgcaacttctgcctcccagactcaggtgatcctcccacctcagcttctcgagtagctgggactacaggcatgcaccaccatgcttggctaatttttaatttttttttgcagcgacaaggtctcactgtgttgtccaggttggtctcaaactcctggactcaaagcaatctgcctgcctcggcctcccagagtgctgggattacaggcatgagccaccatgccaagccacgatgggccacattttactcatccatccctcattgatagatgttttggctttgcaaatattgttgctaggaacatttgtctgcaagtttttgtgtgaacacctgtttgcctttatctcaagtgtatacctgggagtgaatttgctgggccacatggtaactgttgaggagctgccagactgtttttcaaagtggctgtaccattttacattcccataagcagtgtactagggtgccagctctgcacagcctcaccaacacttacccatttcccgtttttccttctagccgtcgtggtgggtgtggagcactgcctcattgtggatttcattggcatgtccctcatgcttccctagcgacgtcaagtatctttccatgtgcttattagccatttgtatgtagtcattggagaaaaatcattccgattccttgcccttttatattgaaaaaatttttttcttgccgatttttaaattgcatttttttttttttttgagacggagtctcactctgttgcctaggctggagcacaagggtgcaatctcagctcactgcagcctccgcctcctgggttcaaatgattttcgtgcctcggcttcccgagtagctgggattacaggcatgtgccactacacctggttaattgggttctttttatagctgattttttttttttttttttttttttttgagacagagtctcactctgtggcccaggctggagtgcagtggtgcgatctcagctcactgcaacctccgcctcccaggttcaagtgattctcctgccttagcctcccaagtagctgggattataggtgtgcaccaccacacacagctaatttttgtgtttttagtagagacagggtttcaccatgttggccaggctggtctcaaactcctgacctcaggtgatcctcccaccttggcctcccaaagtgctgggattacaggcgggagccactgcgcctggcctatagctgaatttgaagaattctttatcatttctaggtagaagtccttgtcagatatgtgacttgcaaataccttctcagcatccactgagagtccactctggattgtctttccacattcttgatggtgtcttttgaagcacaagttgttaatgttggtgaagtctggtttatcctttttttgctgctgttgcttttggtgtcatagctgagaacccattaccaaatctcaggtcacatgatgtatccctgtgttttcttctaagagttttatagttttcgcttttccatgtaggtctttgatccatttctagttaatttttgtatatagcataaggcagggatgcaatgtcattgttttgcatgtggacatctagttgtcatggcaccattgtttttattattttactttaaaaaatttgtttttagagacagtctcgctctgttgccgaggctggagtgcagtggtatgattctagttcactgcagcctcaaaatcctgggctcaagggatcctcctgcatcagcttcctgagtagctaggactacagggtgtgcactgccacacctagctaattcaaaaacaatttttttttgttaagagacagggtctcgctgtattgctcaggctcatctcaaacacctggcctctagggatcttcccactctggcctctcaaagtgttgggattacaggtgtgagccaccatgctgggccagtgccatttgttgaagagcctcttctttcccccgttgaatggccctagcatccttgtcaaggatgagttgactatagctgtgcatttatttttggaccctcagctctatcccattgacctatctgcctctcctcatgccactacatcactgacttgattactgcagccctgtaaaagttttgaaatcaggaaatgggcatcctccatctttttcttctctgtcagggttgtcatggctattctgggtcccatgtgtttccatgtgatttttttttttttttgagacggagtctcactgtcactcaggctggagtgcagtggcgcaatctcggctcactgcaaccactacctcctgggttcaagtgattgtcctgcctcagcctcccgagtagctgagaatgcagatgcgtgcccccacacccagctaatttttgtatttttacaaaattttgtaaaaatttgtatttttacaaatttgtattttactgggtttcaccatgttagccaggctggtctcaaactcctgacctcagatgatctgcttgccttggcctccaaaagtgctggcattacaggcgtgagctaccgtgcctggccccatatgaattttggaatcagcttgtctgtttctgcaaagaagccagctgggattctgacagggattgtgtggactccgtggactgttggggttatttttgtcttctttttgctctgagctccccttcctaacctcgagctggtgggtctttgtccctctgggactttctgatggctccttctccattacggaatgaggtccaggttccttcagttccacactgttgttacctggtgtccagagctaccccatccggcctaacgctcttcccatcttcccttcccttatccatcactccccttagatgtggccacccacatccccagctcccacaactaactctgtttcagttattctgtgttatcacccccaaacttcttagacttaatgcctcagttcaggggtttggagacacagtctctgtcccatcagcagccaccccttctggcccagggtctccactagtgtctaggggaatccaggagttgtcacgtcacaggggttggctgcgctgtggcctgacggagcaatgacatttttcaatgaagggggaagacggagactgccctgaaggaaactgcagctcaggttcctaaatgggggagaaactatgtgcaaaaaattacccagcaaggtttaaacaattgtgtatttcagctttattgattttatatatcaagaagggagaaagcaagaatcaagaaggggaaaagaaggccaggcatggtggctcacacctataatcccagcactttgggagactgagtctggcggatcacttgaggccaggagttcaagaccagcctggccaacatggtgaaacccagtctatactaaaaatacaaaaacacagaaacaaaaaaatcacgcaactgggcgtggtggcgtgcacctgtagtcccagctactcgggagactgaggcacgagaatcccttgaacccaggaggcagaggttgcagtgagctgagactgcaccgctgcactccagcctgggtgttagagtgagattctgtctcaaaagaaaaaaaaatgctggggagtggggagaagaaagggaagggagagccaagagtgagtagggcaggagcttctgaggaggggttgagactgtgagaaccctcttagagaagtggtgaggtaccctgagcacctttgtcactgcagacgctgacatggcatgtgtgtcttagtccatttggcttgccataacagcacaccatgcactgggaggcttataaacaacagaagtttactgctcacagttcaggaggctgggaagtccaagatcaaggggcctgcagattcagcgtctggtgaggacccacttcctggttcataggcagcaccttcttgctgtgtcctccctcagtggaaagatcgaggcagctctcaggggcctcttttataaggccactaatcccactcacaagggctgtacctaatcacctcctagaggccccacacctaataccatcatcttgggggtgagaatttcaacaacagacattcagtacacggcatgtggccagtgagttccctcttgtcctcctgtcatgcctcttctgggcaaatattctctgctctgtgcatgaaggatgtgatgtacacattttggcatctttggtttgaggaggaggtaaaggagggaacttctctgggcaggccaaaggtgttggagcccctagtgtcctggatccatgggccgtggcctggaaggagccagtgtggcgctaactagaaccctgaggcccaggacaccagggagttgctgccagcgttacccggtgatggggccagggttagacttaggaggctctagaggcttccgtccctggtgggagcatcgctcggagcattgggctacctcaggctctctctgtgccccccactggacacctcacccattcccacgtgtttaaataccaccttgatgctgacacgcctgactttatgtttccagcatcttcccttcctggcacactcactggagtctttctcctgagtttcctgtcgaacatgtccataagtgaccctgattgtcccctccagatccagccctcaagtgaaaggccaggggcagggagactggggaacggagaccccagcttcctgaggcatgatttgcctatcgaggcagggaagcaccaggatgtttttgtccccatagtgaggagaggggagaccctgggccacctctggttttgttatctcagggcaccagccaccccagcagcccaggctggctctcggactcagccccaccacccagccatggctccccgcaaacccacccctcctctccattctcacgaccaccacctcactcaggccccagctgctgctgcctctccctggaccccacccgaggcccctgcagttcctgcgtcctgatggccccttgcaccacgctccacatggcagctggagggaggaggcttgtcacaatgcccgttgtgctatttcagctttggttatttatcttaaagacagataatgcatttgcgtggttgaaaatcaggaggtgagaagcctctgccctcttcttgggtgtccccatccccggaggtgctgttcatgagctcctggagggggccttccagaaaggttgatgcataccacacataccctccccttcccgttcgcacaaatgcagtgtgctcatgtcccactgtaaggcaaagcacacggcgccatcccgttccatggccaaggagcgtcccacagtgtgggctgtgctggaaccttccagccagcacctcatggacatctgcattgtttacggattttgctgtcatagacgttgtatacctctgcacacgctgtatgcttccaggatgcttttcttggaagtggaatcatggggcattggagcctcgggctgaccatctggatccatcccacggggtcagagagagcttcagaaacagaatcatgatgtcccgcctcccacactcacacatcccaccgggctccccaccacagagcccagcgcagtctccttggcgtggcctgtggggtgcagcctctgatgcctccacccattcccttttgctctagctggagtgcgacaccccccgaccctggggtccctgtggttccctccgccaggctctgtccctggctcttcacctgcctggcacctgctcacctgttggccccatcctaaatgctgcttttgtgggcatcttccctgcccacaaggtgtgactgtagtttccctgtgacccccttggtgccacttgtccacgtttatttgcgtttgggtgatgttcccctccgcagccacagctgcatgtcatccgggagctggggcctttttctcacagggacccagccccttctctcgcacctggcctctgttaggccatcgggaaatacctgctgagggagctggtgagacagtggccctgggcctccagcccaagaggcacacattggccgtgggtgtgcacggaatgctggccctgagcacggtcacagtgggtggtttcggaggcttcccctggacttctggcccaggctgccccccgttatcttggacatgcttcatttttcccatcctcacgtaaacccctgcaactcctccctaggaattacaaaatgacctagaccgggaaacaagcagtttgcaggagctcgaggctcagaaacaggatgctcaagaccgcctggacgagatggaccagcagaaggccaagctccgagacatgctgagcgacgtccggcagaagtgccaggatgagactcagatggtgggtcccggccacctccggggcagcgccctatgcacaggcaggggcttcccaaggactcccctgagctcgtgttacctgggaacacaacacttagacatcctactgggtcaatagagttcctccaaacaccacgtggaaaagtgtccaagcacctgtggcttgacttcctggccacccccctgtactcctagaagtcaggttgtataagtgaatggccttggtccctgcgaacttgtgccctgaacacaccccacctggctgtgccccacaacacagggagttccagggtgcctgtgtcccctcctcaggtgtctctgaggctcctcacagatcccggaggctgcaacctcagaaaactctatgacgttcagcctctggggggatggacagattgttcgtgcttggtcatgcccctcattattccaaagtgatcttccgttagccacagtgggatgagcccatctgccttttcatttgtgtctctattttgggtgtagaaagaggcctgtaaggaagccaggtgtcgggcctgggttaggtgtctgcgtccctggcttagcttgtttcggggatgggggctaagagttctttctcggagtcccatttcatcctgcactgtgaatctctttaacatcttttaacatctcatttcagatctcatcactgaaaacgcaaatccaatctcaggaatctgacttaaagtcccaggaagacgatctgaaccgagccaagtcggagctgaaccgattgcagcaggaggaaacccagctggagcagagcattcaggctgggcgagtccagctggaaaccatcatcaagtccctgaagtcaacgcaagacgaaatcaaccaggtacttcacggagtcgggtccctgccacatgccagggaccagcgagccccaagagccgaggctgccactgctgaactcctttgctctcacccttgttacttacgtgagggtctcttttgggaggctgtggtgctggcctggaggcgcagggccaaggactccccagggcatgttccagagtttgttggcattggcctggaggagttcactttcctttcctgagcacacagcatcttcaaggagtaggcggggtggggtgggaacacttaattaatggctcatttggagagaacttggggttctttccagcctggtcctcacacaaacaagagggacaaagtcagagagatgacttctttgtccttgggcaagagaacagacgtcatcctccacagccactggtgtgttcaggaggcgccaccctggagcatcacgccatgcaggacccccattctctaagctgcctgggacgcccccaccctcttcccagtccaggggggggcgctggcttctcgtggcctgcagccgttgcccttccctgctctcctgtgggcagtagatgaaggcctctgtcctggccctgggcatccagtctacacagtggttgtgacactggccctcgcctgtgtcggagtggccaggcacacttcttttaccaattgaactggtctctgtctgtgctccattagccagtttataggccacagttgatcgcaagcatggaccgctcagagatttaccaccctttcttgtgctttatggttaatatctgtaggattactttcagtgttttctcttctaacccttagagtttgtagttgggtgtcaggagcaaagatatgttgctttgcgcagtgcagtgccttacacctgtcatcccagcactttaggaggctgaggcaagaggatcacttgaggccaggagttcaagaccagactggacaacatagcgagaccccatctctacaaaaaatacagaattttttttgtattttttgcagagatgggtcttggtttgttgcccaaaaatataggtggtgacacgcacctgtagtcccagctactcaggaggctgaggcaggaggagctcctgaggtcaggagctcaaggctacagtgagctatgatcactccactacattccagtctgggtgacagagtgagaccctgtgttttaaaaaaaaaaagcgtcttttctgacatgttttcctgaccctgcttaatgctgatgatgtctttgttgcacaggcaaggagcaaactttcccagctgcatgaaagccgccaggaggcccacaggagcctggagcagtatgaccaggtgctcgatggagcccatggtgccagcctgaccgacctggccaacctgagcgaaggcgtctccctggcagagaggggcagttttggagccatggtaaaggttgaataaacgtattacagtatggggctctggtcccctggtgtgacagcagaacatcccacccgccagatctgttcatggccaacgttggttccagccaagtgcaggcggctgtctgttgtttttgctgccactttgcgcgttcacaccaggccttgcagcctggcacaggtggccatgctgaatcctggcttccagaacaaagtccaagataggcctggatcctttcagaacctgttttgaatgccctccatctctgcggaagtatttacattgggccaaccacccaaattcagagggcttctcaaacttaaccaaaattggatcagtttctgctcattgtggaaaccccacattctactaatcagggggcaggggacatctgaggggcatgtgtctatgtgtatgtgtgtttccacaaggaacaccttgaaaagcaaatgtgttgctaaagatgaggaagtaatggcaagcagcgccccagggtgttgctctttcaagtaagaattggcctctcctgaaattttggttatgtttaaaaacctctgcactttactctgacctcatgaccctggagttgtgatcaggcctggggcaggggactgtcggccccttacatttttgagagctcttgagcccctgataccaagacaggtgtgaccttttccttaggtggtcacatcccccctgttcacaccagagtctgcccctgcagcctcgaacctggggacatgtagtttcccatttcgtcttggtgctgttccgggagcggatgggccgggccgcgcatgtctggatgtttccttggtgctctgctgcctccagcagctctctccgtgctgccaccctctctcccagggctcctccctggagcccttctgctcctgggcctctgtacgtcatggattcctcttcctccctggaataagagtgagcgctcgtgctctctaaacaccacacttgcctctttatgttcaatgcttgatgtgtttcttttctcagcagccaagtcctcagtcccaaggatttatggggaagcacacgcgtcccctgggctgctgggaaggcactgctggcgagctcatctgtctcttgtgtctggcccccgctgggtgcaccgcctccctctttcctcccatactctcttttctcgtggactcgtaatgaggtggtttccatagccgcccccgggcccgtcatcatcagctttatcgtctaaatttaaacgatgagcattcatccttcatgagttacgagaagccagaactcctcgctttgctccctggctgttcttggcgtgtgtgtttccgtctcacaacccggctcctactttccccatctggcattgtcccctggcaccgcttttggcttgtcctgctcagtcttcgttcagggaacagcttcctcttaaatgtcccttttgcaggtttttagaaaccggttttcttggataaaagttggcagtgaagtggcagtttgcaagtggccagtgattcccccaactccaaagacagatttttacctttctggttatttttgttcatcttttgggcagggcaaaggttacctgagacacaattactttgggaatgtagattaagatacgttacatggaaacttgcaactggcatccgaaagaaaaactgtttttatcctgttgtacaaatacagtttttaaagcatttttctggcttgtttctatttcttaataaatacttggaagagagatttttgtttactcctgaacacttcaagactgcttcagagccgagagagaggtgtcttagttctcccttgtgggtcgaagttgggggttttaggtccctgagaatagtgtatccacagtggtacatctggaacttcctatgtttggacagttctactcaggttactaaattccatgtgaagctcacgcagtgtgactttatctcaaaagtcaggggtttttttttttttttgtttttgtttttttttttttgagacggagtctcgctctgtctcccagactggagtgcagtggcacaatctcagctcactgcaacctctgcctcccgggtccaagtgattctcctgcctcagcctcccgagtagcagagattacaggcacgtgccaccatgcccagctaatttttgtatttttagtagagacgaggtttcacagtgttgcccaggctggtcttgaactcctgacctcaggcaatctgcccgcctcgacctccccaaatgctgggattacaggcgtgagccacctcacccgccaaagtcagggttcttaaagccatatttatttcttgtctatcatctgattatgagaatattgacctcttgctcaccatccaatcaacttatggagagaagctaataaatcatcccagacttaggccttactgaggacagattaagaaaggttgattgatctgtcacatccagacccagtggcatgctggagccagtttttattgactttccagaaccgattattaaataggaactggccgggcacaatggctcacacctgtaatcccagtcctttgggaggctgaggtgggaggattgcttgaggccagctgcgtgccactgcactccagcctgggtgacacagcgagactcaatctctaaaaaaaaaaaaaaaaccccaaaaagcaaaaaacaggaacttgtgagctagttgcttggaaacttgaaatcaaccatgatgagactgtttacaccacaggaattggcagaagctctaaaccagggcttttttctgagagaactgattcccagcacacccctgctgcccagcactcctctaaagggcgggaatgtcacagaagcttcttcagccccctttcagagttgccgtgtgtatttcctaagaagggtacaacttcacactggttgctgaacttgttcaagatattacatctctgccaagggccgtgtcattcatcctggcccttgtctgctgtactcgtgtcccccaagttggcagatgggtctgttctccttagtaggtggtctgcaaggggtagagttgatggtatctttgtaacagggaaatctcgtttcccactctgattctgtgcaatggaatcaaaaccactattagttaccctgacctcctgaatcctgctggggtctcaggcttccccttggaaggggaaggagtgattgtggcttcaggccaatgactcctgagaaagtgattgcaggcctgactgtcagtgcagggggcttgcagccagcattcccagaacctcagtctcttctctgccattgttcactgttacttggcagtcttccaagtgacgactgaaaacactgaaaaaaaaaaaccttataaataaatgccaattaaaaactaaatagagccaggcatggtggcgagtgcctgtagtcccagctacttgggaggctgaagcaggaggatccttgagcccgggagttctgggctgtagtgtgctatgctgattgggtgtctacactaagttagtcatcagtatggtaccttctgggagcaggggaccaccagtcgcctaaggagaggtaaacctgccctggtcagaagcggagcaggtcaaaactcccacgctgctcagtagtgggattgcacctgtgaatagccattgccctccagcctgggcaacgtagtgagatcctacctttaaaaacaaactaaatagaagctttcattctgaggtcaagctggcattcttaactcgctgctttatccaggtcatgattcctctctttcttctggaacaaatacattcctccttccatggggcagtgtgaaaggcagattttccacgtgggcctcctggcttctttagagtaggacttctccatctttatctgcatccgagacccccatcagacgcttgctgggcgtgtgtgtcttgtggtcgtcagcacctgacgtccactcagcactgtctccagctgcagtgcttgtggacatctgtacttaacttgtctaagaacccggcttggtttccccaccttgggaaaaccctgtggtcggaggctccagctattctttcccaggtaagaaaaaccattccatgttcatcagatggcagggatgtgggtgcattctcctgaagtgggggccgaggaagcggcactcatgctgattcacactcattcacagcccagaccggtggcttgtcttaactctgtacctctcataactgtcctgcacccctaagttggctgccccagggtggtggcagccttgctaggaaactttcttttggacctttgatgtcatttccccacaccattgtccctatttttgtggacgccccggctttttaatgattttgttttggtcggttggaatactggactggtttgtgagtcctacgcaggaatgccagtgtgtctgccaaattcaatgagggtgttgtgctgtttttttaatatcacagtgaaacattcatgttttcactgagggtgtgtctttattaactaaaacagagtccttatttaaaccaactgtattgttcccatgtatatgacaaacccacccttttcagactacttcccattacaaaaatgtgctcttcaaaagtaaatattttttcttctcgtttaaatgaacctgtttgtttctagaaatacacactttaaaaaaaaaatgcaaagcattgtgtatgctctagtaattctaactgcataagtactcatttcctcataggacagaaacaaccagcatgtttcttggtatgaaaactccattttcccaaatgcccacctaggtacatactcaccgagaaaaggatgattgaggaaggtcacacctctgaaatgaggcctgtgctgctgttgttgagtggctctttacagttttcttcatggcatttccaagtttattatttttttctgactcattgattaaaaaaaaattgtttaactttcaggtaaaatagacaaacagccgggcgcggtggctcacgcctgtaatcccagcactttgggaggccgaggggggtggattacttgaggtcaggagatcaagactggcctgcccaacatggtgaaaccccatctctactaaaaatacaaaaattagctgggcatggtggcgcacgcctgtaatcccagctactcaggaggctgaggcaggagaatcacttgaacccgggaggtggaggttgcagtgagccgagatcacgccactgcactccagcctggatgacaagagtgaaactctgtctcagaaaaaaaaaaagaaagaaagaaaaatagacataaacttgaccatcttcactgtctttaagtgtacagttcagtagtgttaggtatattcacattgttgtggaacccagctctagaacgttttcatccccatgaaatacccactccccatccccccacccacagcccctggcagccactgttctacttcgtcactgtgaatgtgatgactctagggttctcatagaagtggaatcataccttgtgtgttgttttgtgactgtgatttcactcagcagcctctcctcaaggttcttccatgttggagcatgtgtcagaatttgcttccttttgaaggctgaatcagattctgttgtgtggctcgttacaattttcttgatgacatttcaaattcattatttttttctgacttagaaaaaaattttgtttttccgtttatccattcattcatcgatggacatttgagttgcttccactcaatgattttttaatgaacttttattttagaatagtttttagatttatgaaaaaattgcaaagataggccaggtgcggtagctcatgcctataatcccagtacgttgggaggctgaggtgggaggatcagttgagctcaggagttcaaaaccagccctggcaacatagtgagagacttcatttctacaaaaaatataaaaattagccaggcttggtggtgcgcgcctatagtcctggctactcgggagaccgacgtgggaggatcacttgagcccagatggtcaaggctggagtaacccatgagtgtgcaactgcactccaacctggacaacagagtgagaccctgtttcagaaaaagaaaaactgcaaagatagtgcatagttcctctatatcccacacccagttcctcctgttagtcacatcatatatagtacatttgtcacaactaatgaaccagtattaaacattattattcactcaagttcatacttcttcaatgatctttaattaatttttttttttaaagatacagggtcttgcactgttgtggctggagtgcagtggcacaatcatagctcactgtaacctccacctcctgggttcaggcaatctcctgagtcaacctcccaagtagctgggattataggtacacgccaccacaccttgatttttttttttttttttttgagatagactcactctatcgcccaggctggagcgcaatggcgtaatctcagctcactgcaacctccacctcctgggttcaagcagttctcctgcctcagcctcccaagtagctgggattacaggtgcccggcacaacacccagctaattttttgtatttttagtagagacaggttttcaccatgttggccaggctggtcttgaactcctgacctcaggtgatccacctgctttggcctcccaaagtgctgggattacaggcgtgagccaccatgcctggcctcatttttaaatttttgtttttatagagatgggattttgctatgttgcccaggccagcctcgaactcctggctaaatcattctttttagggtcatgctactcaaagtggaaatgtgagttaagtatggaattccgtactttgctttaactcagaaataataaaatccctgtcctgtttcttcacaaaattgtaggatgatcctttcaaaaataaagccttgttatttagcaacaacacgcaagagttgcatccggatcctttccagacagaagaccccttcaaatctgacccatttaaaggagctgaccccttcaaaggtatctcacttgctacccactttctcattgaaagactgtgtgttttatgtcgaatttagagtggttcttcaactagaaaagtaaggacatgccacaatctgaaatggagggggaaaggaatgccttttttttttttttttttggagacgaactctcgctctcttgctgtcagccaggctggaatgcagtggcgcaatctcggctcactgcaacctccgcctcctgggttcaagcaattctcctgcctcagcgcccatcaccgcacccggctaatttttgtatatttagtagagttggggtttcactgtgttgcccagtctggtctcgaactcttgacctcaggtaatccacccgcctcagccccacaaagtgctgggattacaggtgtgaggcaccgcacccagcaggaacgccttttaagcttcttatctcaccctgttaaccagagagccaaggcatcaagatacagtgggaagtgttccaagctcaccacaagacccacatttgaaggcagcttggccagcccccttgaacccttcagtacttcagtttcctaatccctcagcaggttaataaatttcctccttgctcacctcacagggttgataaaataatcagagctagtaatgatcatgaaagtacctggaaaaccatggattcctacataaacctaaggtctggataattttaggagtctgtccagagccacacctgagtcaagaataactaagaattccagaaacaagatttccaagtttctgtccatgtttcagagcaaaacagtatttccaggaggaaggctctctacatttttgagaaaaacactgaggtggggagagggcagcgggagcttgagcttcagcttgggtttgaagcctgccgggtctgagaggcgaatctggcagcccctgaagcccaggggtgccgccgcctcattgctgcagggccggtgataaagtgagggacagcccagggtcctgtgtcctcttacccagggagctggcaggcagatgggataaaggaaacccagcatgggaagagaggagtgaattctagcccactctgtgtcttccccaactccagtctgtgtgggacagccagcagtaccttccttctcatcttaaacatcctagccagaaacagctgcctcctccaggtccccctctttgatttgccaaggttttgagggcaggtggatagtagagaaggaactaacattctctccctacactggaggagtagaaggcaatgaaaggcttgggaggtgggtggctgtgtccaagggcccggcccgcatcctgtgccctagagctaataagcatttctctcctcttccaaccaggcgacccgttccagaatgacccctttgcagaacagcagacaacttcaacaggtaaaattcagtgtttcccggaccggtctttagactgtgtccagtcctggctcagaagtcgcatgtggtgggacttgtgtccacatacaccggggatggcagccatgtaactgggaaggacggccgtccatccatgttgtacccattctcggtcccgttcccttctggaggtggctcccctccccaggtccagtcactgcccgcaccccaccctggagtgtggtgggatcacattgcttgctaatttatttatttattttatttatttatttatttatttattttttattttttttttttttgagacggagtctcgctctgtcgcccaggctggagtgcagtggcgcgatctcggctcactgcaagctccgcctcccgggttcacgccattctcctgcctcagcctcccaagtagctgggactacaggcgcccgctaccacgcccggctaattttttgtatttttagtagagacggggtttcaccgtgttagccaggctcgtctcacactcttgacctcaggtgatctgcccaccttggtctcccaaagtgctgggatgacaggcgtgagccaccatgcccgaccgatttattttttttcaggtgaaatttatgtaacataaaagtcactgttttaaagcatccaattcagtggtattgagcacactcacagtgttgtgcaatgatcaccttcatctagttccacaacattctcatccccccaaaaggagaccccatcccaatcagcagtcactccccattccctcccgcaacccctggcacccaccaacctattttctgtctctatggatttacctgcgttgtttattattattattattattattattattattattatatccagctcctgcaggatattttatttatttatttagagatggggttttactctattgcctaggctggagtgcagtggcgcaattatagctcactgcagccttgacctcctgggctcaagcagcctttctgcctcagcctccttagtagctgatactacaggcgtgtgccaccacacctggctaattttttattttatttttctctgtgttgcccatgctggtcttgaactcctggcctcaagtgatcctcctatctcagcctcctaaagtgatgggattacaggcatgagccattgtgcctggccaggatattattatttttaaagtcaattttattgagtggcataatttacacagaacaaaattcacccattttactatgtaataagatgagtttcattaaatatgcacggttgtgtgcaatttgagaacacttctgtcattcctgaggcccctttgttgtcaccctccaccctctcctcagggtcccctggccaccattatcctgttttccgtcactagcgttcttacctttctagaatttcatgtaaacggcatcattctgtgatgtgttcttttatgtctgggttctttcacttggtataatgtttacttatggggcatttttccttctagatccatttggaggggaccctttcaaagaaagtgacccattccgtggctctgccactgacgacttcttcaagaaacagacaaagaatgacccatttacctcggatccattcacgaaaaacccttccttaccttcgaaggtgagtggggtgggacgttgcccgggagagctgcgtgcctgctctgtgtggtaagggtggcgcttcccgaaggcccccttcccttcgtggagcgtacatggtgcctgcgagtgtgggccatggtgtctgttctccgggagctggtatcccaggctgatttcattcctgctgagtgagggagctcactggcctagtcactgcagtgacatcctgtgagccccaaggtgcagttagcagtccagtggccccacatcagggcaaggaggatgtcacccatagttcttatttctctatccccattcctacccctcaactctagtcatctgcccccactgccccttcatctcccaaaaaagactaaatcacacaagcaccacatgctcgcatggacccggccaccctgcacggtccttgtaacacacagcactggtggggaccttagagtcacgtttggtaggtgctcccgtcacggcaggagtaagtgcaggcgtctcagcccggctgccttgcctggtgtctcctgagagcatcagccaactctgaccctccagtttccaactccagcatacctgtactcccatccccgggcgtggcagacaccgggtattttgcatattatgcccaagagattgggttaaataggtgtcaacttggatttcaaaaccaaaaaaaaaaaaaaaagcagcctcggtgatggagcagaggatgttcatgatggagtgagcgtgcttcatagccttcttccgttttctaggctgcaacccaggcccggggcctgctcagagacgggcactcaccctccttctcagggctcctgctaccctggcgcccacctcgctcactccctgtggaccttttggtctttagcgcttgaagctccttgaaggcaaagactcatttgcagtattttcttattggcccctttttaatgtccttaagacctgtagtgagaatttccctagcattcctggtattggtgatctgtttaccaatttcattgacctttcccataaccagcttttggcttcatttttctctactgcttgttttctatttcattgattttctcttttctatttctatttttttccatttccttactcctatttatttggggttactttgctcttctaacatcttaagatccaagcttcattcattaattttagacttcattttctagtactggcggtccctgacttacgatggttcaatttacagttttttgactttacaatagttttatcgagatgcagtcccatcataagtcaaggagtgtctggacttaacattggtttgacttctgattttttgctttgtgatgggtttattgggatattacgtacattttcaacttaaaatattttcaacttacaatgggtttatcaggatgtaaccccatggtaagtcaaggagcatctgtataaatttaaagcaacatatttcccttaagcactgctttacatgtatttcatatatttgaatactttatctcttcattgccattcagttttgagatattttccagtttcccttgtgaattctgttcacttatggattacttaaaagtatgttgtttcatttccagatacttggctttttctcctaggtatattataatactattattattgatttttaattaaatttgttatttgagaacatattctgtatgttttcaataccttcacattaatcaagggttgttgtttgtggcctatgttggtgaacaaaccatgtacacttgagaagaatgtgtatctagttgttgggtgtaatgctctacaaatggcagtgaggttgaggttcctcatagtgttcagattatctgtgtcttgtttgtttgttttttagtcctaccagtgtctgagagagaggcgttaaacattctcctatgattgtggaattgttcatactgcactttaatttgatcaagttttgctttgtgtattttgaagctttgtcaggtgcataggtgtttatgattgttgtgtctttctgacacaacaacctttttatcattataaaagattcccatttgatctctggtgatgttctttgtcttgaagtctgtttaatcacttcattctcctcatgttattcactacatgatacatcatttttcaaccatttactttcaacttacctggatctttaaaactgataggtgtcttttgtaagtagcatagtgttggggcttgcttttttttttaaaatccagtcagaagtccctgccttgtaagtgtaatgtttagtccattaacatttaatgtaattattgatatggtttaagtctactattttattatttgcttgctttttatcccatgttttgtttcctgctttcttttgaattgtttgaatgtttttttgaattctgtctattggccttttattattttaatcatacctcttttaatgattgtttagaggttgctttaggaaatatcatgtacagctttaacttttcatagtctacttgaggttagtattgtattatctcatgtaaaatatagaaaacttgcaaccatgtaggtccatttgtccacccacccttgcagccagcatgtcttatgttatagccgtcatgtgaatttcatacatctaaatacattagaaactccataagactgttacaatttttgtattaatccattgtgggtattgtaaagaaagaggaaaaaagtagtcatttagttttacccaaatatgtaccatttctgatactcttcatttgttactgaagattggttttccctccattatcattttccttcagcctaaagaactttctttagcacttcttatagctcaggtcgactgtgttgtcatttttttatttttagttttgaaacagagtctcactctgttgcccaggctgaagtgcagtggtgtgatcttggcttactgcaacctcaacctcctgggctcaagcagttctcccacctcatcctcccaagttgctgggaccacaggcatgtacctccacacccagctattgttttattttttgtagagatgggatttccatatgttggccaggctggtctcaaactcctaggctcaagcaatcctcctgcctcagcccctccaaagtgctgggatcacaggcttgagtcacttcacccagctattattcttttcttttctttttttttttccaacctccgcctcccaggttcaagcgatttctggttaatttttgtatttttaatgcagatggagtttcaccatgttggccaggctggtcttgacctcctgaactgaactcaagtgatctgcccgcctcgtcctcccaaagtgatagaattacaggcatgagccactgtgccaggcctgttgtcattcttgaaggacattgtgtttgatgtaggttgttggggttttgtttgtttgtttagtgtgtttttccactgccttccagcctccattgtccttaatgagaagagtttttgtttgtttgtttgtttgtttttttgagacagagtttgctctgttgcccaggctggagtgcagtggcgtgatctcagctcactgcaagctccacctcccgggttcacgccattctcctgcctcagcctctcgagtagttgggactacaggcgcccgccactatgcccagctaatttcttgtatttttagtagagacggggtttgaccatgttagccaggatggtctcgatcttctgacctcgtgatctgcctgccttggcctcccaaagtgctgggattacaggcgtgagccaccgtgcccggtggagaggagtatttcttcaggtcattgttatcctgtatgtaataggtggtttttctctggctactttcaagattctctctttatctttggttttcagtagtttttgaagtttctgggtgtagttttcttggtgtttatactgtttaggctttgctcagcttcttgaatctgtaaattatgcttttcaacaaatttgataagttttcattgccggttcagtggctcattcctataatcccaggactttgggaggctgaggtgggcggatcacttgaggccaggagttcgagaccagcctggccaacatggtgaaaccccgtctctactaatacaaaaattagccaggcgtggtggtgcacacttgtaatcccagctacttgggaggctgaggcaggagaatcgcttgaacctgggagtcagaggttgcagtgagctgagattgcaccactgcgctccagcctgggtgacagagtgagactcccatctcaaaacaacaaaacaaatttggtaagctttcagctgtcagttctcctaatttgttttttctgcccaattttctctcccctctctttctgggattccagttacatggatatgagaccctttgttattgtcccacaggttcctgaggctctatttatttatttatttttcattcttttttctcctttttcttcagattgagtaatttctactgctctgttttcaacttcacttactctttcttttattcttggttatttagctaacctaatgaagtggggtttttttttgtttgtttgagacagagtctcgctctttcgcccaggctggagtgcagtggcatgatctcagctcactgcaacctccacctcctgggttcaagccattcttctgccttagcctcctgagtagctgggattacaggcatgcaccaccaagcctggcttatttatttttgaaacggagtttcactcttgttgcccaggctgcagtgcaatggcataatctcggctcactgcaacctctgcctcctgggttcaagtgattcttctgcctcggcctcccaagtagctgggattacaggcatccaccaccacgcccatctaattttttgtatttttagtagaaatgggttttaccatattgaccaggctggtctcaaactcctgacctcaggtgatccacttgccttggcccccacagtgctgggattacaggcatgagctactgtgccttgcccgcctggccaatttttgtatttttagtagagacagggttttgccatgttgtccaggctggtcttgaactcctgatcttgggtgatccactgaccccggtgatgaagtttttattgtagatacactttttcagttccggaactttcatttgtttctttcgtatattttctatttctcttctaaggtcacctgtgttttcactcattttaagtgtattttccttttcctcattcagcacagttataatcaccgttttacgttgtccctgtctcagagttccaccatctgggttattttgagattggctacactgattgtcttttccggtgagaggtggtcacatttttccagttctttatatgtttagaaatgtatctgatacatggtgagcgttctgtgtagagactgtagtctgttttctccaaagagcaggaatggatttgtttcagcaggcagttaacttggtgccactcacactgcagacactcaccagcagatggcagaagctccaatcccagctcagttcttgtggcctcagctacaggctgcctcgagtccccccaggcttgcgtgtgcagaggccagcctgagacttgggggagagtggatcatgaagttcagggcttgcatctttgcatctctgcccctccatcccgattccccttcctttcccctgggagtggttgtctctgggctccatcctctggtggtcagattctaccagaatcttaggcaccctcactgtgccttcctgctgtagctggcggaatggaaactcaacctcctgctatgttcttctgccacattcaaattctcctccaaagtcttcttcctgtcttgttcacttcccagccttcaggccactgctttttgtatttgtaattttggggatattccgtccaggttgataggtgctatctgcaggagggttgatctgttgggattttactctgcctgggttgagttttaatcattccactttccctctggctcagcactggatgttgtacatcgacgtcaggaaggtctggttgaatgaatgggtgatggaaccaacgaactgctttttactctttcctctctcctttcatttagctcgacccctttgaatccagtgatcccttttcatcctccagtgtctcctcaaaaggatcaggtgagacccatgacttatttttcttcctgactattccttgggcagtagcagagctcccccgcagttaacactttcactcccaaagccagcgtggcctctgtgtttgtgtcatcagtcagtggcacccagatcctggcctgagcccattaggccaaaacaagcacccgctgctgctccccttcctgggcatgcgctggcatctttccagaaaggaattttggcagtaggaattcagtaatagcaccagtgatattaactactgtttactcactcctccttataaatctttggtttgtatctttgggttttttccctaaaagaaatccagaatttgaccccaggtactggcctatgttgtgggttctgtgtttgaaggaacctcatctcacagtgtagaactcgcagatgcacgctcgagcctttatgcaatgggagcatctgtggacaccccctttcttttgggaacaggccccgcttggtcctgcagcttgcgtggggcgggtagcagtgtttggtatcataggcgagtgtatccagtactctaggcaaatcccttccaggttagaggagaaaacacagcaaaaacctctatccaaagacaccaccctgtataaatcatgtgggtggcaggtcgccctggagttgctcctcgcctcctgacccattgagacccagtgggacccaggggccacgcctctgtggcaacttgtcactcttctgatgaccgtgaatgatgctggccctcccagagtggtcgtcacagtgagaaaccgtcttgccatgccagagtgggcaggggggccttgctgagaggccttcatgcagacacacgtgtctaatgaataaatgcagccttcctgagtctcctggttcaggggccatctagcatttcccctccaccccagaaggcatgttctcttaaagacctgtaactctgactttgttggtgccgattgcagatccctttggaaccttagatcccttcggaagtgggtccttcaatagtgctgaaggctttgccgacttcagccagatgtccaaggtaaagcccctccacggagcccccgcgcctctgctagtgtctttgtgcctcttgtcatggtgtgggctgccaggcgtaattgttcatgtcacgtatgtatctccccggcacctttccaacacaaggtcaggtctggaaagcatccatggctgtgatccaatgcacggcagtcccgtggggtgagccctgacccttcccagtggcataggtgccctgggctcccctggctcccactggtgtctgacgaccatcaggtctcagacggtgaagtcattgccatggccgagtagaaacttgagaaggcgttgggcacaggcgtctcgagagggccatgggcagcaggcctgcaggtgcgaggcgtccagggaaagtgggccagcgagtgttcagagtcgcccatgtgacagaactctcaaggggtgttgaaaagtgagggccggcctccttgaataaatgcagacagatccacaggtgaggagtgaactgttgaaggaggacagcagcgaggctggttaccagactggacccgttggtgtccggccctcaccacacggtgacctgaactcactgtggctctggtcccagacagctgtagggcttctccagacgctggcagtgtggttggagctcatctttaaggtagcatagagaattcaacagggaacatccagaatggacaagtcaaaaaacaacaatagaagccccttacgactgaggtgccttccggaagaaactgctggaaagttggaaatgggggctgtggtgagtgggaaggacagggctgcggcaccattgtgcttccttgtgagttgtatgtttccctgtttgagtgaggagcatttttctttggcaggaatgaaggaaagcagatgaggtgtgtcccgtccctgacacctgcgtccactctgtcccttctcggcagcccccaggcaggggcagatgggctctgtcttcggggggctgcaggggcctgctttcctcacgagttccacctgcagaggcccaggcattatccacgctgcgggaagaggcagtagccacaagcagaacacagcccccctcctggagcccatggcccaggtggtaaggggtggccggtgtggggggtcccctggagcagctgggcccagtccctgtgagcgctgctgtcagcctgaaggtggtgaggggagggagccccgggagtacctggaagacgcgtgccccaggcatgaggccccctcggggccccaccggccccatgcccaggtgccccaggtgccagtgtgactgggcagtctcccttggctgccccgtgttcactcagctggtggagcagatgagtctctgagcatcttggggttggcagcggtcgcaacttgtgatcacagaacacagattccgagaagcacttgagattctgttcaggttttcaaagacgcgtgtgtgcgtgccctggcggcgcagcagatcccacttctgaccgaggcagggtgtgtgtttacacagatgagcctgggcagagggagcccagaggccctggcatggcgcccccctccttccagcacacggagaaggcctccatccctcatatgccacgctgtgacacggtttgggactggcagaagatttagggcccagtgcacaggctcctgggcaggcgggaaaccatctcccgaaagcagaaaacgttggccacacggtggcagcagtccctcaggcgtcctggtcgtttctggttgtcgcaagtggactcctcttcctttgggaggctggatctgtcttcctcctctcactgtgagcagagggagggagagctagcagagcctgagctagggccgggatctaatgaccgccctctgcctgtccttgggccctgaaaccaggggctcttcacacacatgcagctgtgatttcagagccggtctcacttcctattggcggtgccgggccaggacagagttggacagagctgtggaaaatgggtctccaatactatcttgttttgattccagcgttccatcagctgccttcatgacacttgtacagccgcattctgagctcaaccctgaccttgcagctctgtttttcctttttggttacctatctgtttttcaagaacaacattgtggatataaataaaatgctaagggaaatgaaagtggcaagaaggtgtttttttaaaaaacaaaaaaaaaccatcatcaacttttccccatctgagcagagcagggaggcccttttgtaagtccctgaattgaagcaccttacctctgcgtggctttgctgaggagagtcacagcccacagcctgattctagaagtttcctttgggaggctcttcgggcctgcactcttagttgaggccccaccctcacctgaagagatttttctagacagtatcaagcctatgtgacataagctcactttaaaaacagattccccaaagtatgtttccagggagcatttgagaataaaaacaagagtccaacttatttcaccctcttctgccctgaaaaaaaaaaaaagccatctgtgaaatactgggttagtcgtcagcccatttttagcaacttctcaattgtttaaagctgtgcattgatatttagggctgctgtttacaaattcagtcttctgttttgaaccagttcttcaactggtgaactcaaacgtgtttctcttagagctggttttcatagtagctttttctgtcttccttttattttaagcacacttcactcttgccgagcccagagagcccctgacagctttactgaaacctttctaaaaatagagattttccttgaagccgctgcccgagtaggaaagagttgagtccccaaggaggcttcttgggaaacttgaagtcatgaaaattgggattcggaaatgacgcgggcattctggagctaggagtgatctgattcactgcggaggcagtgccaggcgtttattgaaagcctgtcgcctcgcgagttgccaattggcctcgtgggtttaaacacacatgggaggcgccaagccggcttggcccgaggtgtccccggtcagcctggagggttaggcggctctgatttgagtgtgtcaccaggtcttacaactttggacgtccaggctgagtgtggttttattgcccgggtcctattgcgcgacacagagggtagaaaggctcactgcagccactggaaccgaggccccactccgagtctggagatgtggcccagaagccagcacatgcccagggaggacaaggcccagccggtcacaccacttcccatctagacctgcttggctccccatcccaggccgcgggggactcgcacgggccctaggcccagggacatgttccatgaatcgcagaagcacccacagacgggccagtgtttttcccccattctttcccaaacagccgaccctaaacggcccattttaaagctaagctgcaggccgacactgcccctcatgtctcggacaggcctggggacaactggggcagcagatgggggcactcccagattccaatcgcagcttcgtacttggtgtgatcattgtcgtgtggtccatgtgccaactttatctagtgccagtgagtggactgatgcctgtcacatggcacctcatttccttcttgccggagccttccgagctctgtcactcttgccattttacagatgaagaaaccaaggcacagggtgttgagtaggtggcagggttggggttccagcctgggcaggacagtctgcccaggacgaggccctggacccaccactggggtggccctcggcagctgagggcagcgtctggtggccccagtctgggaggcagacgatgtggcagccctggatccgccgtggacctgctgtgtgatgtgggcaggctgcgcctcctttgtgtgcctcagtttccttgtgtgtaaggcagaggtgctgacagtgggaccccctgccaggtcactgggcctattattaggtgagaagatcagcacagagcgagtgtctcctgcctgggcagcttcagagggcggcgtgaagcccagggaagggatctggtggggtcatctgtgcaggagcctttggggccccttcccctccctgggggcacctgccactgcccttatcggggggacctggaatgggtaggctgcctcttagaggggccacctccctgttctgtctctgatgtggctctgactgggccgagcaacctcgactctaggactacacaaggtccgaggcagccatatctctgtgacgggacgcaaatagcccagatcgatgcatctctgtaactagatgctagaggcctagatgactgcatctctataactagctgccagagacacaggtggccacgtctctgactagactccagaggcctaaacggccatgtctgtgcaactaaattgtagagacttagagagtcgcatctgtgtgactagatgccagagcctcagacgaccgcatcggtgtgactggaagctagagcctcaaatagctgtgtcagtgtgactggatgtgtcagtgtgactgtgtcagtgtgactagagccttagatggctgcgtctgtgtgactagaccctggagccttagatggccacgtcggtgtgactggacgctagagccttagatggctgcgtgtgtgtgagtagaccctggaaccttagagggccatgtctgtgtgactagacactagagccttagacggctgcattggtatgagtaaacgctagaagcctagacggctgcatctgcatgactggacactaaaatcttagacggctgtgtctgtgtgactagacgctagagccttaaatgaccacgtctgtgtgattagacgccagagccttaggtggccgtgtctgtgtggctagatgctggagccttagatggctgcattgctgtaactagacactggagccttagatggccgctttggtgtgactagatgctggagccttacacggccacgtctgtgtgactagatgctggagccttagatggctgcgtctgtgcgactagatgccggagccttagacggccgcatctgtgtaaccagatgccagagcctttggcagccgcatctgtgtgactagacactggagccttagctggctgcatcagtgtgactagatgctggagctttagacagctgcattggtgtgactggaagctagagcctcagacagccgcgtctatgtgactagacactggagtcttagatggccgtgtctgtgtgactaggtgctggagccttagatggctgcattggtgtggctagtctacagtcttagacagccacttttgtgtgactagatgctggagcctcagatggccacatctgtgtgactagatactggagccttagacagctgcactggtgtgactggacactgtagccttagacggccacgtctgtgtgactagacgctggagccttagatggttgcattggtgtgactaaacgctggagccttagatggccttgtctgtgtgactagacactgaaggcctagatggccgtgtcagtgtgactagacgctggagccttagtcagctgcatcggtgtgactagatgctggaggcagaggcagccatacctctaagactgtctgctggacgtggtggtagaccttttcccccacatctgcaatctgttgcattcagattctcgagggaaaccctgggagtgtgcctttgtactcttgacctgttctctgtctctaggccttccctgctggggagaaagttaaagacccccggcccctccctccacctctgccccactctgatctttctcttctatgctcttggaggaacacatgatcttttttaattttttttattttttgagatggagtctcgctctgttgcccaggagtgctgctgtggcgggatctcagctcactgcaagctccgcctcccaggttcacgccattctcctgcctcagcctcccgagtagttgggactacaggcgcccgccaccacgaccggctaattttttgtatttttagtagagatggggtttttcaccgtattagctgggctggtcttgatctcctaacctcgtgatctgcccgcctcggcctcccaaagtgctgggattacaggcgtgagccagtgcgcccggccaggaacacatgatcatttttacccctatttctgcccattccttttgtttcctgtcgcagtgttatctctttgtcctataatttcctagttattttgcatttttgtaacaatgtgtttcctctgttagtaaaaatgtagttattttctattttattacagacttaattattttctgttttagtaagagtggttactcatccttcttctgcccatagaaagtgattttctccctcctgggacaccccagccccttccctcagacgcctgagatatgctggcccttctgtggctgatggagaccctggctcccctgtgcctcaccggcgctccaagtgagggacaagcatccccccaggtggcggcgcttagtatctgctcatcacaggcctggaggcagcaggtgccggggagaggactgtgcttgccctccaggtgggagaggcctggaagcgtgtctctgtggctcagtgagcagtgcaggcgtgggtggcaggaagcagccccagggagagccctgggagagctctgggggacggcagtggggtccagccaggctctgagcaaggagaggggttcctggtggacgaggtgggccgagttccccagcaggagacctgagtgttgcaggacttggaaacaggaggctgagtcagcggctggggggtcagtgggttctggggactaaggaggcattgtgaggggaggggtgacttcagaggtgagcctgaaaaatcaggcagctggggcagcgatgaagtccctgcatgccttaatgagagcttggagcttccctataggaagtgcctacctacctacctacctgcaagacgtcgccacatatctgcctccctgtctaccacccacccgcctccctgtctctacctgcccatccatccatccatccacccacccgccattcattcgtccattaatccacatatatgtctatccattcatccaactaccattccatccatctgcccacccaccatccattcatctatccaattgttataactatctctgactgtctctctctttaagctggaggatatggtccgatttgggtttgagacagcaggtgtggggtggaggatgtggatgggtgtgatggaggctgaccgagggtccgggccagaggtggtcagagcccagtggaggtggcgtgggcatgctgaccagtgcgggtggccgggcatgtgaggatgcacttccacctgaggtgctgcatgtgcagcccagaggcatggaggaagaaagtctggtgccagctgacccagcacctggagctgtccatcactaactgaaggcagtgaccacaccggccagctcagtggggaggcggcacaccagggcatgtgccaagcaccacagccagcatacaggtgagggtggggcgtgtctctgaagtgtaagcaggaggcccaagggaccctatgtgccaagtcctggagtcaggaaagacccagtgtgcctcgtgtgactggggatgcccttggtgctagaagcccgtggaggtatgggactgctctctgccaccctatgttgggcagctcatcacccacaggccagagggcccctgctgttgagggtggaggaaagcatggggcttgaaagagaccccacgtccaagcagggccatgttgtgcagtccagagggtaggaggccttgccagggcccttggagcatgagcgtctgttcagtggacatccgtcacctttgttttaacaactatttttgcctctctttcatgtcctctcttacagcccccaccttctggccctttcacctcctccttgggaggggcaggattctcagatgacccctttaaaagtaaacaggacactcctgctctgcctccgaagaaacctgctcctccacggcctaaaccgcccagcggtcagtaagctttcttctctcgcagccaccgcctaccggtgccggatggcgggggaccagggcctccctgctcaccagcccagagtagcagcagatgccgtgggaccctgtgtggggagcaagagggtccccccggcccagctgcccaggtccacgcaagtgccgtatgtgcgtggtgtgtgcctcctgcctgcccgccctcgccccgtcctgtgggcccctgggcttctggctctgtattggagtgcacaaagccttggccttagagctccccttgtggctgggggcgcttcgtgcggcctccgcctgagcatgtcagtgccaccccgacgccctggctatacttcaggagccactcatggccggcagccctgtggccactctggccccttctcttccgtccttctccctgtccgtgctcagggagggcctgttgggggtgagggtggcaggagtcgctgcttggtccagtcccttcccagctgcttcaggactgagagtggagggagcgggagattgtccttggtggcatctgatgtgaggaggcaggatggctcggggctcccctctgccccagcttgcccaggcatctcaacgcacagctctgaggaggggacttcctacaggccctgcccctcttccccatggccagtgctgccaatgtctcctagccttggccctcgagggtcccctgaggattctgaagccctttaactcacacgtgggatttctctcgtgtgacagagttaggccggcggccagttggccagactctcaaacagaaagctattgcttcaagtggcagaaggagtcactgcagctccctgatccatttatctacccggtcattgcctgttccatctgtgccccggtctgggacgcctcctattctctaacctccaggcagactgttccccacactgtccctgaattgtgggcagccacaggagacccacgcactcccaggatcatgccttctgttacctgtcttccctagatagggcatgcccccgagccctttccatcagctccagcgagggaagtggtgctcaccctcctgcctacacgtgcccctcccctggaatctgccactggcctcactttgcagcccctgtgtcatcgcaggtcctggaatggacctagcaggctccgcatgcccccagctcactagttacgagtgaccctcggtcctgcacctcggccacctgtcagtagaggtgaacataggggaagttatttttagaacaccgcctctctcctcctgtcccctgggctggccatggccttctctcaggaggatggggacccagcccgcagtgcccaggttggctttcttgtggatgagtcaggagaaaaagtatgaccaagtatgggctgtgtggatttagagcagattttctgtgaactgttgagcagatacagatgcgtaaagagatcatttctgtaagccacacatcaaagacatttaccatcaggaggaaaaacaaaacaacaaagggactcccttccatctgcaagaggccacctgtgccttacacagaggcagtggctcttcagggatccttgttggcttcctgatggaacggcagtgggcctcttcactctgcctaaaagatgggagcagaagcacacacacacacacacacacacacatatatgcataatcacaatgcatgcacacagctggcacacatgcatgtgcacattcccacgtgcggccatgtatttttatgcatgtatgtgcacgtacacgtgtatgctcttgcatgcacatgtgtaccctgtgtacacacatcctccacgcctgcagacacatgcatgcatgcacctgtttgcacatgaacacacatgcatacaggtgagcatgcattcacatacatactgcatcacatgagtattctcgcatgtgcctgcatgtacgcatatgcaggcacacacgcactctcccatgcacccctccgtgcacactctccatgcttatatgcatctgtggacatgtgtgcatattctcttgtcagtacacacatgcatgcatagagatgagcagcatgcactcacatactgcattgtgcatgcctgcacacacacatgctctcatagataacagctgggcatgcacaccctccatgcttatatatgtgcatgcattcattgagacatgcacatattcacatgtgaacatatacatgaatacaggtgagcattacacagatattgcataatgcatgcatgcaaacgtgcacacacatatgcgtgcgtgtgtgctcatacacacccgggcatgcacactctgtgcttacatacgtgtacacacatttacacacatgtgcacgtattctcatatgggtgcacacacttgccgagcagtgccgtatttgctgggccctgaggaggagccatcccactcaacagctcacaggtgcaaagcttcattttcagtgtttcatggaaaccgccacccccgcctccccacgtacctaaacccggcgctgggtctgcttttgaactttccctcagttatcacctcccatcgtgtctccctctgcaagcctacccaccccaccttggcttctgctgttagtgtactgtgggcttcgaaagcagaaaagaatgcttgttaaaagtagaacgtttgataacgggagtttgggtgacttccttgggcctggcttcagggttcaggctttttagggagctgttgcacaatttgagacccagggggtcctgggctcctttactcgtggcacaggccactgcatctttgttctgctgtggttgatggttgctgtgccactcggtgctctgcagaaatatattaacattgatgggcccttaggaagtgcttgaacagttcttatctcactaggtcccagcaagacccgtgagggagacaggccaggccatgcccatttcctggaagaggaaaggcggggagggaggtcatgggggctccccaaggtcacacagcaaggtggcagcagggccaggtctacacccagtgacctgcctcctgccccaagacaggagtaacgagaaccaagccatgagcttcagaacattctctaaaacagccaatgcacgcgcagcattttaagtccggagcaactgcagatctgtgtggaggcctaaatatttctcatttgattcttttacccagaagcaatggctgaacagaaaaattctgcattgtactcgctgctgggtggtaggtacagaccgtgtggtggttgccgtttgagcttgcagcattatttgtgctgtgattccgtactaacctctaacagtccaaacactgagttgacccagtggttgacctttggtgagtcacatgttggggagaagtgtttggctctttggggaattgcaaaggaagatgcttgccctacccttgctctctggtcaagggaatcagagccgggctctgtacaattcccttcccggttcctggccacacggcacagacccacgtgcagcccaggaggcctctggttatgggcaagagcggtcagcagatgagtgtcgggtgaagtcgtgctcagaaagttcgccaggaagacacaaggcagatctcttgttttcttggcttctttaagacagaagatagtgaagctaatctgtgaatttttttttttttttttaagcataaagtccaacgttttcaaactgctggactttatgttttcttaaaacaaacaaacaaaccaaaaaaagcctttctgcctttcttgctaccccaggctttttctgctcagggagaccacacggccagcacacagtgacggccgccttcccctggccaccccagggcttcccagatgctggggctttgcgcgagatgcgtgggtcccagcgtggctgagtgaggaggaaggtgaaatgcgaccccctgtgagcctggcggtcgagccttgagctggtggagatagacagactgacaaaaagtctgaaggacccataggctgtccagtgggcagtcttaaacatgcacacagcgttgacacctgcactcatggaaatcacaatgaaggaacaagcttttctgtcatctctccgcctggcacatggaacatgtctgatgtcccatgctcccatccagggtttgtccatcccagggcacccagaggtttctagaaccctgctaggcctctgtgccaggaaatggctgatgtgtgaggccaggacaggagaactgaggccgcttccttctgtcctctgggcagccaattctgctagaatccaggggactgcttgatcaggctggtttctggacattggaggaaagggaggccccgggtgggtcacttaacctccctgagcctcagttttcctgcctgaccatgggacccactcaggcctagcaggtgggtgtgtgggtgaagcgccttgcacggtgacgtgctgtatgtggtctgtagcccccatccccaccctgcggcacagggaccgggacgcaggcttctgccatatgggcaccttttccaggaaagacaggctgggcagctgaggtggctgcacacattctgggagtcattaattgggcccttttctccctgtgaggtcacagtttagtggaaatcttttccgttaaaaaaagcgtgcagggagttgaacttcaaagagggctccagcgtcctctgtgggtcatcgctcatacaggaccaaatgtgagtttgggtctgagtcacgtgtggctttggtgccatctcttgtgttctagaggctgcagttttcaaattccgtgggagctgcttgtcttattttgtttaaaggtcaattgaggtgaaattgacatttggtgtggctggcatgcagtgtgggtgcacgggcagacaggtgttgacctggacagtcacaggtggacccctccacctgggaacctgcagaggttcctcgagggagagttccggtcacagcgtacagctgagtagcccacagttggccatctgccctcaaggccacatactcagttctgtctccatctaagccagaaagtgcactctggggaccaccaagggccatctcctggggcatgcatggagctttggtgtgggcactaagttcttcttgcctggaggtcttttcaagaaaggtgtatcaaggtattaaataaccagcaggtgtctgttttgggcagaagaaactggtttctttcaggcagatgcagcacagacccggcaggctgccgaaacctgtcagttagagttaggttaaagttagccgtggcacacacctcccccaggtaaacaatggtatattttctgcaacggaccggagatcaagatcagtcagagctcaccgctgaagagtttctaggtaaaagttgttgatttgcaaagagagaaacagattttttttttaagtgcaggaaacggctgtgtgggtgtcagtgattgggcctcagccctgctgcgatagtgggatcctgcgaccggccccacccttgccacttcctgccagcgcggccctgcgttgcggttcctgcctgcagcgcccggtgacaccagccagcgcagttctaccgctaaccagccagtcacctttaacctctccccaatttaatgattattttattactgctaatgaccttttcacctcctaaacaaagccgcataggtgatggtgatgagcatgtcttttcgccccctccccacagttgcactaacgaacagcttttacctaagtttaaccagcggctgtcctgtttgatttgagcagctctctcaacaaaagaagaagacaaaagtcattcttccccttgcaaacaagcccctcccgtacctgtgtgtggcatccacccagggtggccgtgagttcttgacctccctgccgggggtgccacacaggatgcagccaccgaggaagccctgaggtcctaagtgctgccagctctcccacttctctgaaatgccaggccaacatcgaaaccagggctcagtgacctctccccatcatgtgcccatgtgggtcccaaaaccttttgttgattgcacaagatccactttaaaaatggcatctccatttgaaccctgcggttagcacctcagccttgaacttaactacttcaatttcgttcccacgatgatctcagagagataatccggtgggtacatgtgaaattctacaatgggacaagtggttccaccatctcaaggggcctggaaaattctggcacttgcctgccagccaggatggggagggggtcccaaggagcctaaaacggccaaccaggtggagtccctctttcctgcccacgccccccatcccccagcactgctgtgttcaaggaagcttcagagcttccgtctgagccctctggaaggtctgtcttagggctgggtgggacctgctgacggtgccaaggaacggtcccactctgagagggaggaatgtcagccttgtatgtttaaactgactgcaggcagattgccgtttggagcactttctgttctgtaaagaccactgagtttgaaaatagaagcatttgccttcctgggcacactgtacccagaggcggatccagggagtgtcgtgtgactcgattatcatctggtgttcagtggggtgcaaatgctgaggcctggggggctgcagggtggggtgcaggcctagagtggctgggctcccaccccagcatctgagtataggtgtgaacagacgggagccatcgccctggggacatcgggtgtacctgcctccaggacacctcaaccccttgcttggcacctgagggaggtgagggctggggcagacgcctcagaagggggctctgggtgcagctctgggcaccgcctccctgcttttctggcggggtgaacatggcccctcatctttcatctctcctattcaaagccctgagtcagcgcgccccttgcctgccactgctaactgcaaaatatcacatgcactcgggcaatggggaatctggccataaagagagcaaaagtgtcccccaccatgggagctcctggtgggctctgcgcctcacttgctcccctcccaggggctcttttgggtcctttcatgcacgacccctaaccagctttcagactcgctgcacggcgttctcagggatcttgttacatgtgggcaaggcgccttcctaccctttgcagaggtggcgtctgcgacattggcacactccgtagggaggaacaaagctgggcccccttgccctgtcagggctccccgtgcctggctcatgcatagatagcatctctccctggaaatccccccagaggatggggctgacacccaggggtgttcacgcagggtatgtcaaaggtgcccgccagagaacaaatgcgaattttcaaagaagccagaattgtgacacctgccagtctgtattatttttgtcatgaagactggcttgtgatttgtaaattcatttccaaatcacataccccaccctacacacacacacacacacacacacacacacttttttttcttccagggctggtgcagcccttgcctggcaggttttatgtaaatgtcatgggagccttttgtggtgacctctagaaaattgttatttctcacttcaaatgatatttgccttttgaggaccccaaggcacagcaccttttccccactttcttcttttaatggcaagatgaggccacagccattgggttcaacagccccctgcccacctcacacacctcacagggcaggaaaacacagcggccagcagtggctcgtagtaaatatttgttcagcttttctcaacagttcagaaccaaacctcatcctgttcccttcaatgcatgaagcagattttctcaaaattcggtaaatatttttagtggaaaatctcaacgctgcgatcgcagggacctcagattcttatctcccagggctgtgctgcttgacacagctttgatctaaggcagagtgcgcgcggggctggtgcctgcaggactcccagcctgcaggtcccttacgtggtcccgtgtgtcacattgtaaaaaacaaactcccctcatgtgtcttagatgggagccagaggaagacgttgacgtgtgttggggaaaagcactctttcaagacaagtccccgagcagtgatgaattttagaacctatactgttttctttctcccctctccccgcagctaagctttttttctggcaggatggggagggtggaataagacatgtcagtggccttggatgagctctgctggagtggtgccccgcccgggccactgctctcctaggcagcgtgactctcagaaacctggcagttgtatgggcatctgtgttgtgtaggatgaatgacagttgtggttgtgtgggatcacctgttgtgtagggtgaatgacagttgcataggtgtctgtgttgtgtagggtgaatgatggttttgtgggatcacctgttgtgtagggtgaatgacagttaggtgggtgtctgtgttatgtagggtgaatgatggttttgtgagatcgcctgttgtgtagggtgaatgacaggtgggtgcctgtgttgtgtagggtgaatgatggttgtgtgggcaccacctgttgtgtggaatgaataacagttgtgtgggtgtgcatgttgtgcaggatgaacgagagatgtgtgggatcacctgttgtgtagggtgaatgacagttgtgtgggtgtctgtgttctgcaggatgaatgacaattgtgtgggcatcctctgttgtgtaggatgaatgggagttgtgtgagtgtccatattgtgcaggatgaatgacagttgtgtagccatctcctgttgtgtaggatcaatgatgcttgtgcatgtgtgtcccctgttgtgtaggatcaatgatggttgtatgtgtgcgtccactgttgtgtaggatcagtgatgcttgtgtgtgtgtgtcccattgtgtaggatcaatgatggttgtgtatgtgtgtccactgttgtgtaggatgagtgagagttgtgtgatcgttctgtgttgtataggataatagcgaaggtgggcagcttccctgaccacaaacccttgttttgtatttttttgttttctttttgtttttgtatgtatctctcatctgcagaactgcattttccaagtacagcactgaactgaactgtataaacagaacctagccaggatcaaacacacacacacacacacactctctctctctctctcactctcatgtttattactaatatttttattaatcggattgattgagaccatacctcacctgaaccttttatgctcctcctaagcaaaaaatttaaaccaagagagtttcctttccaaggtttttatagcattcaccgtttttatggtttgcaattgtatatttctattcaattttttgtttgtttgttgttttttgggtttttttttttttttttttgctttgcacccagctcttgaggatgcttttaagcggagggcttcctgcaaagcaagatagaaaagtcagaaccttgaaaaactttgctgaccaagaacgctagtgcagcagagccagccccatcacagccccgatcccgggtgctaggggcgtgcgcagcctcgagaagaagcttgagaaataggagaattaaagaaatttctatcagggtggagccggccaccaagtttttttttttttttttttttttttttttaacagcacatactgtggtaaaccatttggttcatattgtttttgctaaagtcagtcctgtgtgtggtttcggtacaccgcttgggtaactgttgaaactgctgtggtttgaaaataagttctattttgtgttttcttcagtcttgtatcccttgccccctgttaatgaagtctccctgcggtaggcagtcagcacacccaagagggtctttaatttcatttgtctttattcactgccgtctgctgtggtccccggtagttcccgctgcaaatatctaggattgatggcatcgaaccaggtgccaggatgatgcctggcacctggtttgatgccatcattcccagatgtttctatacccacttttttgggttttgttttcatgatttccatccccttttctgaaatgcgcgtcagtaaagctctctccttactcatgttttctggagccataaaaaagtataaaaccctggcgtgggtgcgcgtggcagcttttgcttcagggcctggaggcagattaaagttactttgtcacgtttgagataagctatacctcacaaaatcggaaaaaacgattaaggagttagcagaagtggttacataaaagcaggaactagacctagaaggtttgaaaaatacagccgctaaaaataaatcgctgagcaaaagtgggaagtttgggctgagggccgtggccctacagtgatgccgggggctttctttgctcaaagcgtctggtcattagcaaggtcgagagctggaccgggcactcggctgacctcacacgtgtcaggtccaaaatctcctctcttaccaaagcacaaacactaacaactgagaaaaaaaccgttgttgttgttgatgttccttctgaaaacaagaggccagcagttgatgtgccctggtttcatattaccatagtcatgatttctaaataacaacggtttcggcaacagagcaaaaccaggcacaggcagttcttggtgtgaacgaagcttttcatctctctgaacatctctttgcgcatcagaaacctcagcttgaaatggtagcagggagaattcttaaccgctcctcccaaaaaccaatttcttttttttaaaccccccaaaccaagggaggaagatcttcattgaaaagaagaagaaaagcagctcaaaaatgactgatttatttgaaccttctgtaccgtggcagtcgctcttgggggcctggctggggcgtcctccctttacacctccctccacattcttgcaaatctgcctcaggtgatcactccctgcaggaacggcttcgagaaatcaagcagtgtccaccctggacttgctgcccgtcccagggggctacaccgtgtcctgggactttgagcttctcccctggaaacacttaactgtttcctctgctagaatcttgctatttgatccatatcacataggtattcgaggaaaaatcaaatacccaagcatgcacagtaacattgctgtttcctgcaaaccaggaagggcagatgcctttattcccttctcgctccccagggtgttgctccaaagggccccaggtccctggagacccgtggaatctgtaacaggtggcacctggttcaccaggacctcctgaagcccactgtgtgccgagccctgggctggagggcaccagggacatggggcagtattggctggcatttgtggtatgctgggcccgcttttcacagagctgaccctcagccgtgccagaggccagtgccacgggaagcagagtggtgagggaccctgggggagggggggctttcccgtggagggagaagctgggcagaagcaggcaggggctcgagggactggctgaggtcactgtccctatcccctgcaaacccacaggctggggtgcaggacactgtcacactgtcccccagggtgcccctgccggtggctttggtggctccctgctcacacttgctctatctcagcctaaacagcagacatggattgtcccgcagttctagaggctcaaagtccaagatcaaggcgccagtggggttggtttcttctgagacctctccttggcctggtgcatcttcacattgctgttctgtgtgtagatctgtgtcctaagttctttcagtgaagacagtcattgatcctttgacttcgttttaactcagttacccctttaaatatgctatcttcaagtatggttatattctaaggcacaggggttaggacttgaacgtatgaacaattgttggggggacacagccctttgtttggattaagaaacaggctgaggggggtggccgccatgccccacaccgtcttccagggccactcccagccccagggcttggctgcagagctgaacacaggcatgatggggaaggggctgccatttcttccctgagaaggccactgcctgtgatggcattccagttgggagtgccttccaggcagagggacaaggcatagccaggaaagaagccctgggtttgggggttcctggggaaggaggtgccacctggacaagactggggtgtcatccccaagcgggagaagccctcaagcagtctgggcagggtgctggggcccacctgtgttgaggccactttgctgggtgggtttggctcacagggaagggagccgagctggtgggcggccgatagggagatgaggcttctagggacgggagggtggaggtgaggggccctcgcccaccctccatcctgctcaggagccctagggagccccttctgctccagtggacagcctggggctcacaggaggctgggcaggcctcacttgacccccgcccgccagagctgcctgcccgtcccttaggagagggaacggggcaactccgggagacctggcagcgaggccttggcttaccattggctcatgcctgggaccaggagtggccctgcatgggaggctgtctcaaggtgggggtgtgaggcagttcctcaaggccagcggaaccagcccggggtctgcgggctgggccagatcaccctgctctctgcagccccggggaggtcggggtaggaggaggccgcagtagagctgaaggtgggagggacatctggggatagaaaaagggagacacctagaaagctcgggtgtggggactgccctgagagggcaggcgctgtcggaaggagaggggccacattcctgtcctgcccgcgtgggctgggcactgcccctctagggaagggtctccagcatggcttgcccacaagttttggcaaagataggccccttccagattgcagggccccctctgctaactgggccttgggtctgacagtgaattgatttgaggccacaggaggagactgataccaggcctcgacctcccctctttctcatccatgtgagtcctaatagagcccaggacagctcgccctccaaccctgaggaggagcctcttagatggactcacacagacaaggagtctggaaggatctcccgcagctggtggccagaggtcagctaaggatgcaacggcgaccccggtggaaccctgtgggacgggcagaggcggacaggcaggccgcaagggtgggctgcaggggagtttgtctccgagtccttctgtgcaaaccgtgggaaggaagactgtttttccttgaatatgcaaaaagaaagcagcagtccttatgctggcccagaactgccggttgagagaaaagtgaatttccatttccagaagtagggctacaggcaagggggggctacgggccaggttctcactggcctatgctgggcacggcggtgcaggacactgagtgggaggagactcctggaccccaggaatgtcaccttgtttggcgccctccttctcatttccacttcacagataaggaaacggaggccagctgggaggaggcactttcccttgccgaggcccagagctaaaggtggcagatgggggctgtagccccggagcccacaaggacacctggggcctcaaaaatgaggcctgggatggctgatctgctgggggaacagagggaaaggctttagatctgggcatggagagggaccgaggctggcctgtgtgggctcgttctaccggatgaggaaggcaggtgtcccaggctcaggtggtgggcggggcaggtgtggctgggagccagggtgctctctggaggtgcagccagagatccaaggtcaaccctggagggacaggcagttcctggttttttctaaacattagcttcgaaacttccagagttaacacgccggaatcgtgttgcatattattgagcttccagtctggggtgctgcgtggaccacgttgaatgcccagggactccgttgggcagatagaggggtgtcaggagcatggagtcagcccggctggcctgcaaactgcagatgctggaaggcccgtcaggtgggacctcccgtcaccaagcagatcttaacaggcctctgcttcttggtggaatgttctggtacattggcaggatgcactgggaaaagctaccatcctcaggccatgtcccccacacagtgtcattttcctccatttctgaacacttctctctcacctccctgtcaagatataccttgctgggaccgggcatcctggagttccctgcttggcagaagcccagaaaggcccagataaacgctgccccttggagccaccaacaccagagggacagaagtgggggctaaaaaagaacttaaggccaggtgcagtggctcatgcctgtaatcccagcactttgggaggctgaggcgggcagatgacttgagggcaggagtttgaggctagcctgggcaacatggcaaaatcccatctctactaaaaatacaaaaattagccacgcatggtggctcatgcctgtaggaggctgaggtgggaggatcgcttgagccctggaggccaaggccgcaataagccatgattgcaccactgcatttcagcccaggtgacagagcaagactctgtctctgaaaaaaaaaaaaaaaaaaaaaaaaaaaaagaacttaaacctcagcatggcagagctgtgtgcagacccttataactaacacaccgaataaccataccacgttgtgaaactaattcctccttttcatttgcaagtaactctcccctctgcctttttttttttttactgttagaagcttgcagtgtatttttctgctcagccatgattttttaaattagtatgttaataaatgtgttgccatgctaaaatgaatctgtttgaaacgtacctgcatgcaaactattctaggacaactcaagttttagctgctctgtgtgcgttgtgtatgggagtcatctgaagtgtttttcctgtgttgttcacaacccgttaagcccctgggataaagctgattaaaactgggattccccagggtacccccgtccagcctgttagccaagttacaagcttttctcagagaagcgccccgggcttgtgcccaccagcattctgctctgtccgggtgagtaactcatatttctttctttctccttttttttttctcctaaactttccaggtaaaagtacacctgtaagccagcttggttccgcagactttcccgaggcccccgatccattccagccactcggggctgacagcggcgacccgttccaaagtaaaaaggggtttggggacccgtttagtggaaaagacccatttgtcccctcctctgcagctaaaccttctaaggcctctgcctcgggctttgcagacttcacctctgtaagttgagtcctccgcctccgggccaccccactcccttccgcttgcagcttccctgggatttttgtctccttttaaaggcaaacctcccagcttctttagcctcttggtacctcacactctctgtccctcgcgttatttattctacactgccacttctgtaagaaaaacagtttctcaataaaaaaaaaaagagccgcagtttggatgctctatcataagggcacgttttcttccagcagggaggcgggacctatctgtccttcacggtagattcattgtattatttctgacgcaccgaggctgttgtgttcactggtttttggaagccaagatgtcaaacacttccgaagtatgaaaagaagattgcgaaagttacattagggttctgctgtccccaaaaagccctttgtgcacaagttctcacagtcccgccccatgcattttgtgccacaagtgcaaattgaaggacttcaggcagatcgcgccagggaagagcaatttgaagtttttttttttttaaagcttttaaatttcagttaccagctccaatgaaaaaagaaatccagtctagaacagccactctgaaagccaaaacaaaaagagctccaaaaaactgttgagcaaagttaagtgccttttcggaagcaaatctcgggatttcgaaagcctggctttgtttttctctgtgtgaaaaaatattccagattgtaacatgcggtcgcttcaaggagtttttagcagcttccttgatacatgaaaatcttgttctctgaaagcttcaggtgttgtcttcccagaattggtttcactatgtgtgatgccctcgctttcttcctttgggcttgttagttccttcatcattaggtgtgagacgtgttatttatagatgcttcgactcctgggatggctctttgaacacagccctgccatgtcaatgcacagaaagcacccgatttgtttctgagccgtcttgataatctctaccgtgcacagctatcctatggcttatttgtcaatttatttattttagtgacagggtctcgctgtgttgcccagcctggtctgcattggcgcgatcagagctcacttgtaacctcgaattcctgggctcaagcgatcctcctgtcttggcctcctgagtagctgggacgacaggcgtgcaacaccacgcaaggctaatgtttaattttttttttttgtagaggtagggtcttgctgtgttgcctgggctggtctggaactcctggcctcaagcgatcctcccaccttgaagtactggggttacacgtgactggcccatgtggcttatttaaatcgcccaagaccctgacctgtttctggctcttggtgacctataaatattttacaacggcagtgagtttgattttgttgaccctagatgcgcactgggggtctatacaaaatggtgacattgttaataaaagccagaaacaaaacctgctttatctagagtttcttgaatagcccttcatttattttctggtggaaaaatattaaacgctgatttaaaaaaaacagaactcttcacacatgactcaggtactctgtcttgggtagggaagagttaggtaagtggggtgaacggcagcttgaagaaatgactgttctctttctgaaattcataattctatttcctgtgaccccaacccgcaaagggctcgttttttcgaaaagcataaaaaaaaaaaaaacacccaaggtttcaaggtatcatttggcttagcatttctggtagttccagaacaattgttaacttcagttttaaaatagcgccagccattttatcaccctcatctcctggtgggaaagcaaattccacccaggcctggatgcagccctgttgttttctgtttttgttttttttttccctaagtttttggtttttacatttttggagatgagtctcgctctgttgcccaggctagaatgcagtggtgcagtcacagcttcactgcagccttgacctcctgggctcaagcaatcgtcccacctcagcctcccacgtagctgggacctcaggcgcgcaccaccacatctggctaattttaaaatgttctgatagagacaaggtctcactttactacccagtctggtctttgaactctgggctcaaatgatccttctgcctcaggctcccaaagtgttgggattacaggcatgagcccctgtgcccggcctgttttctgtttaaaatcacttttcccactgcaaataccccagtttttttccagaggaaatgatcagatagtgtacttcagccactctgaagggatgggttgagtgaagacaggacccttaattgtttttgtttgtccccttgggtcgtatcattgtctaaaatcatccataaccagctctcctctggggactcaagatgacgtctctccatgttcacggcattcgggggctcagccgatcagctggtggtttctgggttcactggatcttgactatttgtgctaacttagaagagggcacagctgcttcctctggtttgaatgattccacttccctgagcaaatgccaagagggctgtctgactgcccggcagattggcagcgtgactctttcagcgtggacgttctgagactgctgttcagggcatgtttttacctgtgcaggagcagcccagtccatgctggcagtcaggggggcccaggtcacccgcacctcacttgtggaggtggtgccccggcggtgcctctccagaaccctctaatttacaaaccccaaatttccatcaatgggttatttgcgtgtgtggctgttcccgggaaacctcttccctctctggtatttctttaaaagcaggcctttctgtctcaggcaaatgtgtgtattaggaagtggcatttctaggttagcggaacggttcttttggaagttcgcattaagagtagtgcaaataccagatcagctaggccgtgcttcgaattattgaaggagttggatacaatttcattgtcggtaaatgaatgaatgggaagtggctaggcatgtcctgcacatggtggggtggaagtgccatcagacaccttggagcgccagtgaggacaggtgccgggcgcctcccggggccatcccatcgcccagcgtgccgagctgtctaaactgcggatttccaagaggctgctgaaatgaaccacttatttgcttctgaaaatgaaccccatcctgagtgggcaggcctcggctagggtggtgtcatgcccctacggtgtctcggttccatggtaatgccagagggaagcagaaatcagagccagtgtgtttcccagccactattggttttgcatcggccacagacatccagattctggcccgtgtgacccacccagatacgagaactagaaggtggccccgtccagggctaagacagcagacacagagggagctgcggagtcccctttcaggagagctctcccaggcctcacagcccagcgtgcctcctaagtgcatacagacctcaccaatgcaagtctccacagtggattcgtgagctggccttgaaccggtcgactctgaaggcaccaggaactttcctgctgacacctttcatttggaaacacagacccgtcaagggaaggcgcttcagtgacactgtgacacgggggctcagtggggccaaaggcggccagagggctgtggttcagacccagcaggccggttacttggtcgttccaggctttgatttggatccaggcgaacattactgtcagctcccacccaccctgtcctcaaggctggtggagggtgaggtccccgtcagctgcactgtctccctcccactgttgtcagcagcaccatggaataatttccacctgcacttgttggtttttccttgtttttctccccatgaggtgttggaaaattccccaaactggggcgggggggatgcttatctgtgcccctggcagtgacacaatggcggggagggagtccgacctggagactcatcagacccccaagtgtttagctgggcagtgcctctttaagaagtcaagactcagcccttcctcccagggacatcttttcttgatactgacactccgcctgtcccccatctgggtcctgaggccagctagagggaggcctccagggccccgcatccccctcactgccacatctgcctcccaaccaggttccttgcatttatctgctcctgcaccttgcccagtccccccagccctgccatctggccctcctctctcctgcttcccgctcatgccaccatcaagccgtgaaatatccagacgctgccaatctgatcacccaactcgctcgcccaaggagcctccacggggaaatcccagctccttcctggggcccacgagcccctcctcagtctggcttatcccaccccacgcttcatcctggctaccccaaggtcgggcactgagcctcacacccagaacctcgcagggacgcatcctccctgtcagtttcacctagtatcctgctccccacaggcctgggggggaaaaagtctagagtgtgagccaccccttccctggcctcagtgtccccagctgtcagagggatgagatgacagcgggcccacccccaggttgtcacgcagacctagtgctgcgtgtggtggagaggccgtgagtgttcctgtgtgcttctttcccccaccttcctgggttagtctgcagggccctcctcgagagcctgggtccttgggtcctggatcgttctgggattgtttgtatatttctgctcccaagggtgcctggggaagagccactgcgcatgttatctttggtgttactccagtgttgagcagagagctggtcagaggcagcgcatcgcagagagacattaataagggaatcctttgaatccctaagcagcagcagctttcctgagggggccgatgatgccagtgacctctcagggaagtctgggacattgggacccaccctgggggaggagcttgtgggatgtggcttttcttttcatgactaaagtactttgagttgtttgaaatcacctatctcagcatcaagatggttttctcccttttttaagtttttattttaactgaacattttagaaaaacaccccacggataaaaacttgactaaatggcagtgtaagtgccacaccttttgtcagtgttctgggagaaattgaccctcagagccgggtgcggtggctcacgcctgtaatcccagcactttgggaggctgaggcgggtggatcacaaggtcaggagttcaagaccagcctgaccaacatggtgaaaccccgtctctacgaaacatacaaaaattagctgggcatggtagcgcatgcctgtaatcccagctactcagggggctgaggcaagagaatcccttgaacctgggaggtgaatgttgcaatgagccgagatcgcgccattgcactccagcctggcgacagagcgagactccatctcaaaaaaaaaaaaagaaaaagaaaaagaaaatgaccctcagagggtctcagagctctctggagcatggctggaggtagaaataccacattcccagagtgcagaattgtctgcgccgtggggctttagagccatgcacgctggaagttccccatctttgcacctcttggccaccagcgtcaagggcccatcctcacttctctgcgtggggcggggtggctggtttctttgaggcccagaggtcatggttaaggtcacactcaatcacatgcatcccgtccactctgctttccagatggggggcctgagacaggctcgcacgcccactgggcccagccaagacatgcttatcccctgcacatcggaccctccgctgggcggtgggcaggaccctgacccctcccacgcattccctgcctccctccagcttgcaggtcccagccccagggccacatcacccactctccgtttttcctttgcagtttggcaatgaggagcagcagctggcgtgggccaagcgggagagcgagaaggcggaacaggagaggctggcgcggctgcggcggcaggagcaggaggacctggaactggccatcgcgctcagcaaggctgacatgcctgccgcctaggcgagggccgtgtgtaggcgggacagggcacgggcgggttccagagagggggcagtgcagatgtctatatatacacacacacaccgtcgccaccgtactccaaggaccgggactcgggggcttgttcagggtgagcagactcggctgcaagacctggaaaggtcacatctcctggggaagcccttacagaggccttggccaccacttctgcaggtccgtctctccactgtgccatcccccccggggctgactgcctcccgctcttcctctggggacgaacacacagcggtcagtcgaggagaggaagcacccagggcttccccgcctcctccctactcatagctgcagacatccccgcccgccctcccacgcatcagtcagacactcccccagtggtgtatgcactcgttgtataaaatgaagtttgaatgattaatataaaatattttaatacaaaacaagagaagcttctttaatctctgtaaacattgttttccctgcatgggtatcaggaagcagatcaaccaggtggaacattgctctttaaatcttaagtttttacttttaaaaaaaatttttttttaagagatgagatcttgccatgttgcccaggctggtctcaaactccttgactcacacaattctcctgtctcagcatcccaaagtgctgggattacaggcgtgagccaccaagccctgcccatttttatgttttaaccaactttattttttaggacagttttaaacctgcagaaaaatcacaaagatacaaagagttcccataagccccttagacaatttatccttaaaaaaaatttttttttgaaacagggtctgagctctgtcacccagggtggagtgcagtggtgtgatctcagctcactgcaacctccacttccccgggctcaagtgatcctcccacttcagcctcccaaagggctgggattacagacatgtgccactgtgcctggccagttttaaatttgcagaaagatcgcaaagaaaatacgaagggttcccataagccccttagagagtttaccttatttttaacatcttacattacacattacttacatcccaattaatgaaccaatacggattcattattattaactagagtccttactttattcagaattgctctgtttttttggctgagtgcggtggctcatgcctgtaattccagcactttgggaggccgaggtgggggggatcacttgaggtcaggagttggggaccagcctggccaacatagtgaaaccctgtctctactaaaaaaaaacaacacaaaaattagccgcgcgtggtggtgcgcacttgtaatcccagctactcgagaggctgaggcaggagaatcacttgaaactcaggaggtggagttgcagtgagccaatatcatgccattgcactctggcccaggcgacaagaaagacaccgtctaaaaaaaaaaatgcaggtagggcacggtggctcacacctgtaatcccagccatttgggaggccgaggcaggtggatcatttgaggtcaggagttcaagaccagcctggccaacatggtgaaaccccgtctctactaaaaatacacaaaaaatagccgggtggtagtggagcatgcctgtaatcccagctactcgggagactgacgcaggagaatcgcttgaacctgggaggtggaggttgtggtgggccaagatcgcacctctgcactccagtctgggccacagagtaagaccctgtcaaaaaaaaaaaattcgtttttccccctaatgtcctttttctgtcccaggatcccccatgacattcagaccttacatctcgttagaattctctgggctgggtggaaccccgtctctactaaaaatagaaaaattagccgggcgcagtggcaggcgcttgtaatcccagctactcaggaggctgaggcaggagaatcgctggaacccggggggcagaggttgcagtgagccgagatcacaccgctgcactccagcctgggcgacagagtgagactcttgtctcaaggaaaaaaaaaagaattctctgggctgtgtgagtttctcaaacgttgtgtgtttttgatgacagttacaaggagaactggtcaggtgctttgtagaatgtccctccactgggatttgtctgatgtttttcccgtgactagatgtggagctggacttgggggaggaagaccacagagatgaagtgtattgacatcaaatcacatcaaagatccatgtcatcaacatgacttagaaggctggtgttgacctggatccactggacatagatttatttttatttattattttattttattttgggacagagtttcactcttgtcacccaagctggagtacaatggtgtgatctcagctcgctgcagcctccacctcccaagttcaagcaattctcctgtctcagcctcccaagtagctggaattacaggcattaggcaacatgcctggctaattttttgtatttttagtagagatggggttttgccatgttggccaggctagtctcaaactcctggcctcaggtagatttatttttaaaaagcagtttttcagcctcagatattttgttacatagactcgtctcagggcagtaattcatgagattgaaaatacagggccgggcgtggtggctaacgcctgtaatcccagcactttgggaggccaaggcaggtggatcaagaggtcaggagattgagaccatcctggccaacacagtgaaaccccgtctctactaaaaatacaaaaattagctgggcatggtagtgggcacctgtaatcccagctactcgggaggctgaggcaggagagtggcttgaacccgggaggcagaagttgcaatgagccgagatcgtgccactgcactccaacctggtgacagagcaagactctgtctcaaaaaaaaaaaaaaaaaaaaaaaaaggccaggagcagtggctcatgcctgtaatcccagcactttgggaggccgaggtgggaggataacttgaggccaggaattcgagaccagcctggccaatgtggtgaaaccccatctctactaaaaatacaaaaaattagccaggcgtggtgacaggcacctgtaatcccagctactcaggaggctgagacaaggaggatcgcttgaacctgggaggcagaggttgcagtgagccaagatcgtgccactgcagtctagcctgggcaacagagcgagactccatctccaaaaacaaaaaaagaaaatcctcaggaaaaggaagagaaaaaatattggccatccattaagtggaagtggatcatcataaaggtcttcttcctcatcatcttcccattgagtaacccgaggaggaggaggaggaagggttggtcttggggtggcagaggtggaagaaaatccacatacaggcagggcacagtggctcatgcctgtaattccagcacttcaggaggctgaggcgagtggatcacctgaggtcaggagttcgagaccagcctggccaacatggtaaaaccccgtctctactaaaaatacaaaaattagctgggtgtcgtggcagatgcctgtaatcctagctattagggaggctgaggcaggagagtcacttgaacccgggaggcggaggttgcagtgggctgagatcgcaccactgcactccagcctgggcaacaagagtgagactcgggctcaaaacaaagaaaatccacatatgactgaacccacccagttcaaacctgtgttgttcaagggtcatctataaaccataaactgaagtttatggtggatttgggcgaatgtaaagattccaaacctttggtaatcccccttttccaggttacagaccctcgaggggtccctgcagtcctggagatgagggtgttgggaggggacgtcttcttggtgcccatggaatgggcctgctttgtggattggggcctggtggggcctcgtgggctttgtaacctctgagatgcccctaatcttctctgcaaaaacgagcagcttcctgaaagtggtcatggccggaggcaattcccaatacttccttcctcctgcaggaaaaccccagagtgaatctgaaggtcccaagccatgtgcttctgccgtgatagatccctttggagaaggcgctgagtcacctctctccagggtagtcacagctttggcaccatttggtttgggacttcacaattttcacagcgattcagcttccattatcttgttggaaactcaaagcaaccttgtaaatgaagagggtggatgttagcccattttcctgagggaaaactgagactcattccctgcagtcatttgcccagagctccgaagccagccaggggcggaggctcgttttgctgatttgagaaaagaattgagggtttcttagaaaacttcagggtttctagtttcttgttgtcttctgcttatttgcatattcaccgtacccagaagaggcaggtgatggctcttgatatcttagaaatggaaaaccatgtattgaattaggagctcttacccaggggaggggacgtttttagggaaagcagtgaacccctgaatgcacatttgctggttttttgtttttgttcttttttttttttttttttttttgaatcggagtcttgctttgtcaccaggctggagtgcagtggcgtgatctcagctcactgcaacctctacctcctgggttcaagtgattctcctgcctcagcctcccaagtagctgggactacaggcacacgccgccatgcctggctaatttttgtatttttattagagatgaggtttcaccatgttggctaggatggtctcgatctcttgacctcgtgattcgcctgcttcagactcccaaagtgctgggattacaggcatgagccaccgcacccagccctggtttgttttttattgtatgtgggtttgcagtgttcataactttttatctttttttttccccttttttaagagatgggggtctcgctctctcacccaggctggagtgcatggcgcaatcatagcccactgcagccttgaactcctgggctcaagtgatcctcctgcctcagcctcctgagtagctgaccacatccggctaatttttttttttttttttttttttttttttttgagacggagtctcgctctgtcacccagtctggagggcagtggcacgatctcggctcactgcaagctctgcctcccgggttcacgccattctcctgcctcagcctcctgagtagctgggactacaggcgcccgccaccacgcccagcaaatttttttgtatttttagtagagacggggtttcaccgtgttagccaggatggtctcgatctactgacctcttgatctgcccacctcagcctcccaaagtgctgggattacaggcatgagccaccgtgcccggccctggctaattttttttaatttttattttatttttatttttatacaaacagggtctcactatgttggccaggctgatctccaactcctggccccaagtgaccctcccgcttcggcctcccaaagtgctgctgatgacaggtgtgagccactgtgcccagcctccatctgatttttaaagaggtcctcagaccctttaaaaagttagaagccagtctcaaatcctgtttccttccttccctgctacacacacacacacacacacacacacactcccctgctgtgtaaataatcaacatcaaatccacaaatccatcccctctcccattggcagtctcttccacggcaaaggacactcacgccctttcctgaagaatagagtatccaattggaacaaatgtatgatgaaaatttccaaacataatagttgaagagaaaaggacagtaaacacccccacccagcgtcaactgtcatccagattttccacctttgccgcatggctgtcttcctttgctctggagaagcactttagagcaagttggagtcaggatgccatttcgcccacgtgccctgaagcgcacgtcactgagacgtgtggcgactgacatgctaacgtatactcgatgccaaggtcacgtctgagaaaatgaacaatgacccctcctagccatcagatctttcacataagaggcaacttttgattgttttttttcaaatggtttctttctctctctctctctctttttttttttttttttttttgagatggagccttgctctgtctccaggctggagtgcagtggcgcgatctcagctcactgcaacctccacctcctgggttcaagcgattcccctgcctcagcctcccaaatagctgggattacaggcacctgccaccatgcccggctaattttttgtattttagtagagatggggtttcaccatgttggccaagatggtctcgatctcctgacctcgtgatctgcctgccttggcctcccaaagtgctgggattagaggcgtgagccaccgcgccctgcctcttttttttttttttgagacagagtctctctcttgtcacccaggctggagtgcagtggcgcaatctccgctcactgtaacctctgcctcctgggttcaagtgattctcctgccttggcctcccaagtagctgggattacaggcacccgccaccatgcctggctaatttttatacttttagtagagacggggtttcactgtgttggccaggctggtctcgaactcccaacctcaggtgatccacccgccttggcctcccaaagtgctgggattacaagcgtgagccaccgcccccggccccttttcaagtagtttcgatctagggttggttgaatcagcagatacagaaacctccaatacagcagacaagaggcaactttcattttatttttgtttctttatttttagagaaagggccttactctgtcacccaggctgaagtgcggtggttgcgatcatagctcactgcatcctcaacctcctgggctcaagtgatcctcccacctcagcctcccaagtagctgggactacaggtgtgcaccaccatgcccaggtaattaaattttttttttgtagagatggggtctcgctatgttgcccaggctggtctcaaactcctggcctaaagcaatcctccagcctcagcctcccaaagtgctgggatgacaggggtgagccgacacacccatccgaaagaggcaactttttttttttttcttttagaggcagagtctcgctctgtcagccagcctggagtgcagtggcatgatctcagctcactgcagccttcacatcctgggtacaagcgattctcctgccttagcctcttgagctggaactacaggcacataccaccatgcccgggtaatttctgtattttttggtagagatggagttttgccatattgcccaggctggtctcgaactcctgacctcaggtgatccacctgcctcagcctcccgaagtgctgggattacaggcgtgagccaccacacctggtcgcaagaggcaacttttgactgcaaccccattgcgttttgtctcccagattgtaacgagccgtgtcccctttgtgggtaccctttatcttctccgcatccaacaacccagtttggactggtgttcaactggaattcaagggcccacattgcccggtccaagccatgttttggaaaaggatgacgaatgatctacagcctcctctgagtaaatgaaatcacatcttcaaagcccattttatgtaaaaggacattctcatcctggaacagttgtggaaggctatttttaaaactgtcaggaagcgtctgggaaacaaagaaactgcctcttgaaataatggagtcaatatttctgcctcttatcagatcaagttcctttgaaacatgctacttttttttttccaaaattttccccaaagttactaggacctgtacaaattgtatcatgagctgtttttggaaaaatataaaaggaaatggaaatatgatggttatcgcaagcttattccaaagagatgacgtgatgtgggcttgcctgggtagagtcgtgtttacgttgagtggtctttatttttattatattattattattattattattattattattattattattattttgagacagttatgctcttggtgcctaggctggggtgcaatggtgtgatctcagctccctgcaacctccacctcccaggttcaagcaattctgcctcagctccccgagtagctgaaattataggcacccaccaccacgccgggctaattttgtttatttttagtgaagatggggtttcaccatgttggccaggctggtctcgaacacctgacctcaggtgatctgcccacctcagcctcacaaagtgctgggattgcaggcaagagccactgcgcccagccgagtgggtctttaaatatcactccttgatttgcttcctggttttgttttgttttggggataggatcttgctctgttgcccaggctggagtgcagtggtgtgatcatagctcactgcagcctcgacctcctgggctcaggccatcctcctacctcagcctcctgagtaactggaaccacaggcatgtgccaccatgcccagctactttttaaaaattggccaggcatggtggcttacacctgtaatcccagcattttgggaagccgaggcgggtgaatcatgtgaggtcaggagttcaagaccagcctgaccaacacggtgaaacccggtctctactgaaaatacaaaaaaatgagctgggcatggtggcgggtgcctgtagtcccagctacttgggaggctgaggcaggagaatcgcttgaatcaggaggcaaaggttgcagtgagccgatatcgcaccactgcactccagcctgggcaacagggtgagactgcctcaaaaaaaaaaaaattattcatagagatgaggtctctctatgttgcccatgctggtctggaactcctgacctcaagcaatcctcctgactcagcctcccaaagtgctgggattacaggcgtggcctctgtgcccagcctgatttcctttctgactgacgtgcaggggtgctctctattcatgaccttggacctaacctcagtgcacctcagttttcttatttggccaaggaggttggaccagacaaccagtgaagacctttcttttttcctttttttttttttgagacagagtgtcactctgtcacccagtggcacagtcttggctcgctgcaacctccgcctcccgggttcaagtgattctcctgcctcagcctcctgagtagctgggattacaagcacccaccaccatgcccggctaatttttgtatttttggtagagacggggtttcaccatgttggccaggctggtctcaaactgctctcaggctggtctcaggctggtctcaagtgatctgcctgccttggcctcccaaagtgctgggattacaggtgtgagccgctgcgcccggcccagtgaagacctttctagctctaaaagcccttaagatgattattcaagtctccaaaaagacacatattttaggatctcagataataaaaaaagaaaaattgaataaacattatcttatgagcctcatctttatttaaaatattttgctcactcttgataaccttaatttcatagttaagggggaaatcctagttcaaataacactaatgtacaggccgggcacaatggttcatgcctgtaatcccagcactttgggaggctgaggcagaaggatcacttgaggccaggagttcgaggctgaggtgagctacgatggcaccactgctctccagcctgggcgacagagcaagaccccaactctaaaaacaacaaaaaactcccctaatataatgtctcaaaaatatatcaacaatgtgtaattatatcaatatgttatatatcaataatatatctcttataaacttttaaaacaccattgcaagaaacactagtttaataaacgagcaattctgtgactttccattgttattcctatattaaccttcacttgggagagagaacgctttctgaggccagaaacaaggactttgagatcctggtctgtgatgaacattatttctttgtactaaggacaaagggcagaatttccactacgagagccaaaaaaagactcaagacaagatgtagcaattgttcaactgtaaacacactttttaaaggaaatgaggatcctagttctaagagaacaatatggtggaccagaaccctggtttattttccggttctagatcctggagcaagatacctgtggcttctcttcccctgaggtagaccagagaagatattgaagccatggaggggcaacaaacatcttggaaaaggcacagccttaagtcagagttggtgtgaagacagcttcacccctggagagtgtgaccttgggttgctcaaatcactacttggagtccccatttttcttcatctataaaatagaggtcattggccgggcacagtggctcatgcctgtaatcccagtaccg

SEQ ID NO: 1060 - DNA, 3089 bp, Homo sapiens
ggacaggcggcctgcgcaccgccctcccgtcgtcccagtgcgcacgcgtggctgcagccccgcccccgttcccccggcgctcggagcccgagtccgcgggaagatggcggcgccgctcatccccctctcccagcagattcccactggaaattcgttgtatgaatcttattacaagcaggtcgatccggcatacacagggagggtgggggcgagtgaagctgcgctttttctaaagaagtctggcctctcggacattatccttgggaagatatgggacttggccgatccagaaggtaaagggttcttggacaaacagggtttctatgttgcactgagactggtggcctgtgcacagagtggccatgaagttaccttgagcaatctgaatttgagcatgccaccgcctaaatttcacgacaccagcagccctctgatggtcacaccgccctctgcagaggcccactgggctgtgagggtggaagaaaaggccaaatttgatgggatttttgaaagcctcttgcccatcaatggtttgctctctggagacaaagtcaagccagtcctcatgaactcaaagctgcctcttgatgtcctgggcagggtctgggacctcagtgacattgacaaggatgggcacttggatcgagatgagttcgctgtggccatgcacttggtgtaccgagccctggagaaggagcccgtgccctccgccctgcccccgtccctcatcccaccctccaagagaaagaagactgtgttccctggcgccgtccccgtcctgcctgccagccccccaccaaaagacagcctccgctccacgccgtcccacggcagcgtcagcagcctcaacagcacagggagcctgtcccccaagcacagcctcaagcaaacacagccaacagtgaactgggtggtgcccgtggcagacaagatgcgatttgatgagatattcctgaagaccgacctggacctggatggctacgtgagtggccaggaggtgaaggagatcttcatgcactcgggcctcacccagaaccttctagcacacatatgggccctggccgatacgaggcaaacggggaagttaagcaaagaccaattcgcgttagctatgtatttcattcagcagaaggtcagtaaaggcatcgaccctcctcaagtcctctcgccggacatggtcccgccttcggagagaggcacgcccggcccggacagttcaggctctctcggctccggggagtttactggcgtgaaggagcttgatgacatcagtcaagagattgcccagttacaaagagagaaatattcactggaacaagacattcgagaaaaggaagaggcaatcagacagaaaaccagcgaggtgcaggaattacaaaatgacctagaccgggaaacaagcagtttgcaggagctcgaggctcagaaacaggatgctcaagaccgcctggacgagatggaccagcagaaggccaagctccgagacatgctgagcgacgtccggcagaagtgccaggatgagactcagatgatctcatcactgaaaacgcaaatccaatctcaggaatctgacttaaagtcccaggaagacgatctgaaccgagccaagtcggagctgaaccgattgcagcaggaggaaacccagctggagcagagcattcaggctgggcgagtccagctggaaaccatcatcaagtccctgaagtcaacgcaagacgaaatcaaccaggcaaggagcaaactttcccagctgcatgaaagccgccaggaggcccacaggagcctggagcagtatgaccaggtgctcgatggagcccatggtgccagcctgaccgacctggccaacctgagcgaaggcgtctccctggcagagaggggcagttttggagccatggatgatcctttcaaaaataaagccttgttatttagcaacaacacgcaagagttgcatccggatcctttccagacagaagaccccttcaaatctgacccatttaaaggagctgaccccttcaaaggcgacccgttccagaatgacccctttgcagaacagcagacaacttcaacagatccatttggaggggaccctttcaaagaaagtgacccattccgtggctctgccactgacgacttcttcaagaaacagacaaagaatgacccatttacctcggatccattcacgaaaaacccttccttaccttcgaagctcgacccctttgaatccagtgatcccttttcatcctccagtgtctcctcaaaaggatcagatccctttggaaccttagatcccttcggaagtgggtccttcaatagtgctgaaggctttgccgacttcagccagatgtccaagcccccaccttctggccctttcacctcctccttgggaggggcaggattctcagatgacccctttaaaagtaaacaggacactcctgctctgcctccgaagaaacctgctcctccacggcctaaaccgcccagcggtaaaagtacacctgtaagccagcttggttccgcagactttcccgaggcccccgatccattccagccactcggggctgacagcggcgacccgttccaaagtaaaaaggggtttggggacccgtttagtggaaaagacccatttgtcccctcctctgcagctaaaccttctaaggcctctgcctcgggctttgcagacttcacctctgtaagttgagtcctccgcctccgggccaccccactcccttccgcttgcagcttccctgggatttttgtctccttttaaaggcaaacctcccagcttctttagcctcttggtacctcacactctctgtccctcgcgttatttattctacactgccacttctgtaagaaaaacagtttctcaataaaaaaaaaaagagccgcagtttggatgctctatcataagggcacgttttcttccagcagggaggcgggacctatctgtccttcacggtagattcattgtattatttctgacgcaccgaggctgttgtgttcactggtttttggaagccaagatgtcaaacacttccgaagtatgaaaagaagattgcgaaagttacattagggttctgctgtcccca

SEQ ID NO: 1061 - protein, 854 aa, Homo sapiens
MAAPLIPLSQQIPTGNSLYESYYKQVDPAYTGRVGASEAALFLKKSGLSDIILGKIWDLADPEGKGFLDKQGFYVRLVACAQSGHEVTLSNLNLSMPPPKFHDTSSPLMVTPPSAEAHWAVRVEEKAKFDGIFESLLPINGLLSGDKVKPVLMNSKLPLDVLGRVWDLSDIDKDGHLDRDEFAVAMHLVYRALEKEPVPSALPPSLIPPSKRKKTVFPGAVPVLPDPPKDSLRSTPSHGSVSSLNSTGSLSPKHSLKQTQPTVNWVVPVADKMRFDEIFLKTDLDLDGYVSGQEVKEIFMHSGLTQNLLAHIWADTRQTGKLSKDQFAMYFIQQKVSKGIDPPQVLSPDMVPPSGTPGPDSSGSLGSGEFTGVKELDDISQEIAQLQREKYSLEQDIREKEEAIRQKTSEVQELQNDLDRETSSLQELEAQKQDAQDRLDEMDQQKAKLRDMLSDVRQKCQDETQMISSLKTQIQSQESDLKSQEDDLNRAKSELNRLQQEETQLEQSIQAGRVQLETIIKSLKSTQDEINQARSKLSQLHESRQEAHRSLEQYDQVLDGAHGASLTDLANLSEGVSLAERGSFGAMDDPFKNKALLFSNNTQELHPDPFQTEDPFKSDPFKGADPFKGDPFQNDPFAEQQTTSTDPFGGDPFKESDPFRGSATDDFFKKQTKNDPFTSDPFTKNPSLPSKLDPFESSDPFSSSSVSSKGSDPFGTLDPFGSGSFNSAEGFADFSQMSKPPPSGPFTSSLGGAGFSDDPFKSKQDTPALPPKKPAPPRPKPPSGKSTPVSQLGSADFPEAPDPFQPLGADSGDPFQSKKGFGDPFSGKDPFVPSSAAKPSKASASGFADFTSVS

SEQ ID NO: 1062 - DNA, 3288 bp, Homo sapiens
ggacaggcggcctgcgcaccgccctcccgtcgtcccagtgcgcacgcgtggctgcagccccgcccccgttcccccggcgctcggagcccgagtccgcgggaagatggcggcgccgctcatccccctctcccagcagattcccactggaaattcgttgtatgaatcttattacaagcaggtcgatccggcatacacagggagggtgggggcgagtgaagctgcgctttttctaaagaagtctggcctctcggacattatccttgggaagatatgggacttggccgatccagaaggtaaagggttcttggacaaacagggtttctatgttgcactgagactggtggcctgtgcacagagtggccatgaagttaccttgagcaatctgaatttgagcatgccaccgcctaaatttcacgacaccagcagccctctgatggtcacaccgccctctgcagaggcccactgggctgtgagggtggaagaaaaggccaaatttgatgggatttttgaaagcctcttgcccatcaatggtttgctctctggagacaaagtcaagccagtcctcatgaactcaaagctgcctcttgatgtcctgggcagggtctgggacctcagtgacattgacaaggatgggcacttggatcgagatgagttcgctgtggccatgcacttggtgtaccgagccctggagaaggagcccgtgccctccgccctgcccccgtccctcatcccaccctccaagagaaagaagactgtgttccctggcgccgtccccgtcctgcctgccagccccccaccaaaagacagcctccgctccacgccgtcccacggcagcgtcagcagcctcaacagcacagggagcctgtcccccaagcacagcctcaagcaaacacagccaacagtgaactgggtggtgcccgtggcagacaagatgcgatttgatgagatattcctgaagaccgacctggacctggatggctacgtgagtggccaggaggtgaaggagatcttcatgcactcgggcctcacccagaaccttctagcacacatatgggccctggccgatacgaggcaaacggggaagttaagcaaagaccaattcgcgttagctatgtatttcattcagcagaaggtcagtaaaggcatcgaccctcctcaagtcctctcgccggacatggtcccgccttcggagagaggcacgcccggcccggacagttcaggctctctcggctccggggagtttactggcgtgaaggagcttgatgacatcagtcaagagattgcccagttacaaagagagaaatattcactggaacaagacattcgagaaaaggaagaggcaatcagacagaaaaccagcgaggtgcaggaattacaaaatgacctagaccgggaaacaagcagtttgcaggagctcgaggctcagaaacaggatgctcaagaccgcctggacgagatggaccagcagaaggccaagctccgagacatgctgagcgacgtccggcagaagtgccaggatgagactcagatgatctcatcactgaaaacgcaaatccaatctcaggaatctgacttaaagtcccaggaagacgatctgaaccgagccaagtcggagctgaaccgattgcagcaggaggaaacccagctggagcagagcattcaggctgggcgagtccagctggaaaccatcatcaagtccctgaagtcaacgcaagacgaaatcaaccaggcaaggagcaaactttcccagctgcatgaaagccgccaggaggcccacaggagcctggagcagtatgaccaggtgctcgatggagcccatggtgccagcctgaccgacctggccaacctgagcgaaggcgtctccctggcagagaggggcagttttggagccatggatgatcctttcaaaaataaagccttgttatttagcaacaacacgcaagagttgcatccggatcctttccagacagaagaccccttcaaatctgacccatttaaaggagctgaccccttcaaaggcgacccgttccagaatgacccctttgcagaacagcagacaacttcaacagatccatttggaggggaccctttcaaagaaagtgacccattccgtggctctgccactgacgacttcttcaagaaacagacaaagaatgacccatttacctcggatccattcacgaaaaacccttccttaccttcgaagctcgacccctttgaatccagtgatcccttttcatcctccagtgtctcctcaaaaggatcagatccctttggaaccttagatcccttcggaagtgggtccttcaatagtgctgaaggctttgccgacttcagccagatgtccaagcccccaccttctggccctttcacctcctccttgggaggggcaggattctcagatgacccctttaaaagtaaacaggacactcctgctctgcctccgaagaaacctgctcctccacggcctaaaccgcccagcggtaaaagtacacctgtaagccagcttggttccgcagactttcccgaggcccccgatccattccagccactcggggctgacagcggcgacccgttccaaagtaaaaaggggtttggggacccgtttagtggaaaagacccatttgtcccctcctctgcagctaaaccttctaaggcctctgcctcgggctttgcagacttcacctcttttggcaatgaggagcagcagctggcgtgggccaagcgggagagcgagaaggcggaacaggagaggctggcgcggctgcggcggcaggagcaggaggacctggaactggccatcgcgctcagcaaggctgacatgcctgccgcctaggcgagggccgtgtgtaggcgggacagggcacgggcgggttccagagagggggcagtgcagatgtctatatatacacacacacaccgtcgccaccgtactccaaggaccgggactcgggggcttgttcagggtgagcagactcggctgcaagacctggaaaggtcacatctcctggggaagcccttacagaggccttggccaccacttctgcaggtccgtctctccactgtgccatcccccccggggctgactgcctcccgctcttcctctggggacgaacacacagcggtcagtcgaggagaggaagcacccagggcttccccgcctcctccctactcatagctgcagacatccccgcccgccctcccacgcatcagtcagacactcccccagtggtgtatgcactcgttgtataaaatgaagtttgaatgattaatataaaatattttaat

SEQ ID NO: 1063 - protein, 900 aa, Homo sapiens
MAAPLIPLSQQIPTGNSLYESYYKQVDPAYTGRVGASEAALFLKKSGLSDIILGKIWDLADPEGKGFLDKQGFYVRLVACAQSGHEVTLSNLNLSMPPPKFHDTSSPLMVTPPSAEAHWAVRVEEKAKFDGIFESLLPINGLLSGDKVKPVLMNSKLPLDVLGRVWDLSDIDKDGHLDRDEFAVAMHLVYRALEKEPVPSALPPSLIPPSKRKKTVFPGAVPVLPDPPKDSLRSTPSHGSVSSLNSTGSLSPKHSLKQTQPTVNWVVPVADKMRFDEIFLKTDLDLDGYVSGQEVKEIFMHSGLTQNLLAHIWADTRQTGKLSKDQFAMYFIQQKVSKGIDPPQVLSPDMVPPSGTPGPDSSGSLGSGEFTGVKELDDISQEIAQLQREKYSLEQDIREKEEAIRQKTSEVQELQNDLDRETSSLQELEAQKQDAQDRLDEMDQQKAKLRDMLSDVRQKCQDETQMISSLKTQIQSQESDLKSQEDDLNRAKSELNRLQQEETQLEQSIQAGRVQLETIIKSLKSTQDEINQARSKLSQLHESRQEAHRSLEQYDQVLDGAHGASLTDLANLSEGVSLAERGSFGAMDDPFKNKALLFSNNTQELHPDPFQTEDPFKSDPFKGADPFKGDPFQNDPFAEQQTTSTDPFGGDPFKESDPFRGSATDDFFKKQTKNDPFTSDPFTKNPSLPSKLDPFESSDPFSSSSVSSKGSDPFGTLDPFGSGSFNSAEGFADFSQMSKPPPSGPFTSSLGGAGFSDDPFKSKQDTPALPPKKPAPPRPKPPSGKSTPVSQLGSADFPEAPDPFQPLGADSGDPFQSKKGFGDPFSGKDPFVPSSAAKPSKASASGFADFTSFGNEEQQLAWAKRESEKAEQERLARLRRQEQEDLELAIALSKADMPAA

SEQ ID NO: 1064 - DNA, 23063 bp, Mus musculus
  misc_feature (1)...(23063): n = A,T,C or G
gtaacagtaaggctgttcttggagggtaaggagggaactggaaactgggcatggctggacctgcttgagatagggagggagggcccagagaagcaaagtattccttcctggggtctcctagccctgacctgtcgggaagggctgttttgtggagaggagaaggctgctgggaagaggctctggtaggacactatgggtccctcagtagctgaggaggtagcctgtatggggggggggggtgttaatgttgcaggtctggacccagacccactttgatggcctaatttgtgaccttgagccccagctagagctggcctgccccctgacaccttgatctttctgtcatgtttctttccttgctccccaccccccatctcccacccctttcccttccatagctcccctcttacatgggtttcaaaggcagaaatccatgggttccagtcaaagatctgctctctgctgtatgtaactccgatgattctcttaggctctctagtccttgctcttctcacctgtagaatgggactcataggactaactacatcagtctgttaaggatgagggatatcatttttgtgtttaccacacaataggtttctagtgagctgtgaaataaaagtataactttattaataaaaatataacccacttcttggttatctccctgtacctaagaggcagcaaagggctttaaaaaccagaccatgctgctaggttggaggtctgttcctggctggtggaagggatgcttccaagggatgttgctcctcctccatgaggaatgtacctgggaccactcagcatgtacgagtggtctcggtgacttcttcctgtcggacaacggccattttgagcgtctttgctttttcctcatctctagctgtcaggatggaggtcctgagagagaaagtggaggaggaggaggaggctgagcgtgaagaagcagccgagagggccgaacggactgagaagctggagagggtgacaaagtccgccgaagtgagcagagaggggaccatcctgagccaggatgagcttcgagacctggaggggaagctgatggccatcgagatccctacccaagctgatcactcgtgagtgtccggactggggctttcccagcccagcgctggcggtcagaaaggaccaaggcaggattggtagcatctgggctgggagcgggggtcatagagggatgtgattcagtttgaggttctactcccagactgctcaccttgccccagttgtgtgactggggtgtgtggggatgaggggtacgggggtggggggaaggccgtcaaccttttgcagcctccattactttgtctgtgtaagagtgaaaatataagtagtggcagtctccatggagttgtgaaaatcaaatgaagataaggcaaagacagctcaggcattttaggggatttctgggtgtgccaagcatggcctctcttagattattgttatctttccttggacacagggtcataagccaggcccctgttgatgtcaccaagctgcctccttcctataccaccaactcattgaaggaggagcacctgctgctggtggcagacaacttctcccgccagtacagccacctgtgtccagaccgcgtgcctctcttcttgcacccgttaaatgagtgcaatgtgcctgtaagcctggggcttggagggcagggcctgagcaggagcggggtgagggtggggaatggggtgaggcatacccagttctacgtggtggtctctgggtcaaatcccagctgtcctgtagaagtccctgtgaatcagctctggcctgtcaggggctggagagacatacagactcctgggtgggtgggggggggggggttgcaggcctgagatctgaagctctgattggaagctgtagatgagcccagggcctgacacatagtagcctagcaccctgccactgcactgtatctccagccttttcagtcttgagttaaggtgaggtgttactatgtagcccaggatgcccttgaactagctgtggctttcagtgttgattacaagggcctgacacatagtttaggctagtgccctgccattgagctgcatctccagcctttttagtcttgagttaaagtggctactatgtagcccaggatgatcttgaactagaggttgctctccgtgttgattactaacatattctaggagactgtgcctatgtatagggtagccacagatggggaaaactgaggctcagggagctacctggggccatgtggagggtaggcctgctctgctcatctttttcctattgctttgctcttcccttgaggggtcagtacctgctactggagaccaccctggtcactagttacctctgtccagaacctctgtaggtctctgaaaagaccttgtcctggttggagatctgtgtcctttagccctttcttattgagtgagcttagacaattcacttagtgtctcagtcagggttctctagagtcacagaacttatggaatatctcatatcgtaaggaaatttattggaatgacttatagactgcagtctaactaactcaacaatgggcagctgtgaatgggcagtcaaagaatctagtagttgctcagtcccatgaggctgggtgtttccgccagtcttctgtataagctggagtcctgaagaagtaggttccaacagaggagctggcaagtaagtgcaagcaggctaagaagaaagaactcttccattgtcctaatgtaggcctccagctgtggcccagattaaaggtgtgtactaccacacctggacttggaacttgttttgtcccaggctggccttgaactcagagatctgcttgcctgtcttctgggattaaaggcatatactaccctgcctgggtctcagctttcagtggtctctatgcctcaagatctggatcacatttctggattgtagttcattccaaatatagtcaagtcgacaaccaggaatagccatcatacttggccttctgggctcgaaaggaaggggcttttcccctgtccttccagcccagatgcagaacaagctagtattattcccgcggagtgatgtgaatgggtgcctctctgccattgcctcctccacgggccaatgccagtccttcccagcaagagactgctccaacaccctgaggccctgtgaaccaggtctctccagggtccccctgagaattcaagaaaggaggttggaccagccaggcatgaaccctcacaggtccctgctatatggggtccctggcaagctctctcacttgcagaagttcgtgagcaccaccctgaggcccacactgatgccctaccctgaactctacaactgggacagctgcgcccagtttgtatctgacttcctcaccatggtcccactggttgatcccctcaagccggtaagtgctattcgctgattacatagagcaagcccaggggcttaaggtgagcctgggtgctagaaggtcagccaggctccagccttttgcgacacccgtaggggaaaacgagagaggacaaccactgacccaagggtacatagcaagcctggtctctcccctgctggattctgcctcagtttcaggagggacagcaaagagctggaggataccaagctgtctatagctttcaaccccatctttgggcttctaaaaggtttagtctgcttttcactgagaatggggtggagacaggaaagagtggtaaataagcagtcgttgatagaggatgaggcgagcccaccagttccttaaaacagcagacacatacaggttatgtgggtctgtttgtggcacatcctcaagaggctctggatgcaacaggggccctgcccctacaagtgggaggcgactgatggtgggtggcaaggggatctatggagctgacaggtgtgctgtgttcagcccacgcacttatattcctcgaccaccgtgctcaagtgccagaagggaaactgctttgacttcagcaccctgctctgctccatgttgattggctccggctatgatgcctactgcgtcaatggctatggctcactggacctgtgcctcatggacctgacaagggaagtgtgtccgctcactgtgaaggccaaagaggtatgcccaatgttggcagcccaaagaatgcacagtcctgggactgcccatccatcttaggagatcagggcactgctctgactatccttagagaaagcaagaactgggtctctgccctggccaccttagagaagtgaggactgagtgtctgccctagccatcctcagagaagcaggtccccatgcaggctgtccttatacttatgggttcctgccccatcaccgtgcatccgctgttgctccagactccctattgcaaacctttggtgatttctctgtcctcagcaccacccacagcccagtcctccaaactgtggtccctcttgcctgtcttagctcagtttaagacattgtgctcccatggggaaagtctcataactcaaatggcttctgccgtataaacagtcatcactagcttacccacttccccttgcatctgataaaagcctgtcctgtcctgttaatggtgggaaacaatggccaagtaagtgcttgattctcagtcctcctcccactcagacagacagacgggcagacacagacagacaagacagacagacaagacagacataggcaagaaagatacagacaagacagacagacagacacacacacacacacacacacacacatacctgttattgttttaagatggaacacagaaccttacccgtgctgggcaaagcatctgctctgagctatatccccagcccgtttagaggggaatacttagcactgaccccagtgagtgatgcttgagtttcctggctgctctctaaggaagtgataagcaccagagtttctgccaacagaagaagcagttatcaaatttaaaaatatgaagtgtggttatggtcgtgggaaatgaacattacccacatatgaacatatacatatgtatatatttcatgccagaatcacacagacaacaacaacgaaaacaaaacaaaacaaaacaaaacaaaacaaaacaaaaaccccaaatctctttacacttgaaaaaacaccatgcagagtgcacaggaagagctctctacatcctcagtggattccaaggctcagtgacaagggtcaggcccctctgcagctggaggatggagacccggagatctgaagcactgagcagcaggtcaagaaaagaactctccaggggctgctccccccttctcttgctctttctcctggtttttcaagacagggtttctctgtgtaacggtcctggctgtccttggacttgctttgtagaccaggccagcctcaaccacaggaatccccctgactctgccttccaagtgctgggattaatgggaccatggcaacttttaataaggaaaacatttcattggggctggcttacagtttcagaggtttagtccattatcatcaggatggcatacaggcagacatggtgctgagagttctagatcccaatccacaggcagcaggaagagagagagagagataccaggcctggcttgagcgtgtgaaacctcaaagcccaccccctagtgacacacctcttccaataagaccacacctactccaacaaggccaaaccaaatagtgccactacctataagcctttggggcaaattttcaataaaacatcacatacttgatgggcaaatgctctcttacattttttttttcattccatggcctctgagctcacacctcctggtcttcttgtttctgaggcaatgcaaagaatcaaatgtatgtcaataagtaacgaaggtagagagctgtctggatgacaaacaggtttaatatgggcttgggtcggctcagtggctattcatggcatcctgggtagttggtgttatcactcttagtatacagaaagataaaatggcatgctcaagaagaaaatgtgataacatagtttggaggatggagacccagggatggaagcctgggttcgatccccaagactggagattatatttctttcacagtcataagcccacctcagcagctcctgtagagttctttcctgggaacacatatcatcattttgtacttaattatatacacatgtgcacacacattcatgtagaaacacacacgttcacttttctttcctggttcagaaaacttgaacttggaatctgtgtatgaactctcccaaggataacccctgaaaactcttagtccagactatctgccccaccctctatctgggatccagatcagctgggttgagcgccagtgcgagcccttgtgtgtgtgtgtgtgtgtgtgtgtgtgtgtgtgtgtgtgtgtgtgtgtaatgttcttgtgccaggctggtggggaggtctttagtattctctgccatgcagctagtcttgatccataaagaggatcctccacctcgactcccactcctcccttcaggtcctggagctggggcggcagctccctcttctgtcagggctaggccccgatcccattaagcctgtaaagggtgcagtgggcgactttccactcttcttgggtgacagatagtcaagaagaaagagaagacggtgcctaagaaatactccatcaagccgccccgggacctgaccagcaagtttgagcaggagcaagaggagaagagaatacaggagatcaaggatctagaacaaaggcgacttaaggaagaggaagatcgcatcctggtgggcctccacgacactgcactctgacatgacccggtgggcccagtggataacataccagggccataaggccttcccttaagattcactaaagcgctccttacccatagaatgtattgcctttctttggatgaaatctcacctagggtgccccaaagagtgagccacagatctgtcaccttgccccaccccccaccccacccccgccactgccaccattttagtggttgaaacctggaattctaaggaggaatgttggaaagagagttccccttagctggtggtcacccaccttccctgtgcaggaggcagagaaagcgaagcccgaccccctgcatggcctgcgggtacactcctgggtcctggtgctggcaggaaagcgagaggtgcctgagagcttcttcatcgaccctctgactgcacgcagctacagtaccaaggatgagcacttcctgggcattgagagcctctggaaccacaagaactactggatcaacatgcaggattgctggaactgctgcaaggtgtgccggagtcgggagaggggtgggtaaagaccggggatggggggttgtggggagcctggccacctaccctctgatagcagggtctggtggaagtcccagactccacacccacagctatcaagggccattctggcaagatgaacttcaccagtttgctatgtgcattctttttaacccatatgcttattggtttatgcaaatgaactctgggtgcaggttgtccatctaaagggctaagcacactgtccaccgaaggccctgcttcctgtacccagaataagaaagaatacggcccatccctcaggaatcctcttgtgtaaagtgcttgccaccgaccctaatgacctgcgttagatactagggtccgcatggtggaaggagagaactgattcctgaaagttgtcctatgagctgcatattcacacacacacacacacacacacacacacacacacacacacacactctctctctctctctctctctctctctctcgaaaaggtgcacaattgtaagggcgcatcttgttagattggtttgtgataatgaactcccctacataccagcacctgcccactcccatccaataacccctccacccacaagctctgtggtctagcaggtgcttatcaggtacaggttaatactacaaaaacaaggaaaaattcctttatacagacactcttcacttgagaaaggatgcatacgtccacagggagacgtcactgaagggcgggggtaggggcaggtggcatggcctatgggggtggagccagtgctgacttcttaagggtccatcattttgtttaacacacttggtcggcagagtcgtacggtgcacgtactcttctgtgttgggtttgtcaagtcgtggagatgtttgagagatttgtccatttcctgccgggcaatgcgttgctcgtgtttactgttcattaattccctgttcttgaagcaaaccagaacccattttgctgttttagagtggcatgtttaggccatttccagcacgggattatttggatagtgcttcagcgagcacttccctccctgcatttcagggaacacatacatacctgcctctgatggattaagacttgggagagtcacctatcatctcagtagattcttctcattttgcaaaagtgaccgattcaaagcagcactctgtgagagtctggacagcctcctgctccttacactcagtgtttgcttgggggagtctgagatgaggtctcactccagaccaggttgccccggagccatgccttgtgccttagcctcgggaacgctgagattccaggtgtgcatagcgaggccgcttgtttttgccattctgtgggcagaaggtgatgttacgttgtttcaaaactacaactggccttttgaagacggtcctcatattcagaaagtctaaaatctgtctattaactctaagaattagaaagactccagggctgttctctctgggaggtcagttttaatccttttgtgggtgactttctataaaatcagtgttgtttcttctttagacgtcatctgggtctagagttctcttccccacccccacccccacccccaacccaagttctctttgtaggatgttttaaatgacacattcagtttggataacgtgtttatctggcagtgctggagacaaaccccaaaccttgagtattccaggcaaatgctctgccattgagacttatacacccaactcaggacatttattcttgagtaatttctggtactttctttttctttttttttttctttttcttttctttttttttttcttttctttttttttttccttttctttctttctttctttcttttttttttttgaaaatttggtccctttcgtttaaattttcaaattattgctataaaatgttaatagctccttatttttcttttactattttaaagactctctcaatcttgacactgataatgtagtgatttctcctctaatgagcttggttagaggcttttcaatagtgttggttagaggcttttcaatagtgttggaattgtcaacaaactagcttttggttctgttgatttttttttttcatatagctttgtttcatttatttctgttctgatccttattattttctaatgtttgttttattgattagtttcttaaggtgaaaacttaagaaatgaacctggctggctttattttgctagtaaggaccttcatttcactccagcgactcccccgccctttttcccagttcaaaaattctctctccttttccttttcacttatcctctgatccatgagtcattttaaaatgtggtgtttcagccagatggtggtggcatgcccatttaaccccagcacttggcaggcagatcttttgaggccagccctggtctacagaaggagtgccaggagagccagggctacacagagaaaccctgtctcaaaacaaaacaaaacaaaacaaaacaaaacaaaaaaacaaaaccccaaaaaacaaacaaaggttctgtttatagacatgtagatgtgtttcccagtgatctgtctatttttatttcagtttttaattgtatggtttttagagaatgtttaccatgtaacccccactatcttcttacagcttggttgttggtccagcttatgctacctctcaaatgttctgtgaatttaactaaaatgactattttttgaggctgactagaaggttctgttggatgtcaatcttcacaagcctgttgatggtgctcacttcttccctggtcttctttgctggttttctatattctaaagctcctgcctgacattatctgcaccctggattagaatgttggacttctttgtttcttctattggtgttggcttcaaatattctagaaatatgtaatgtagtgaatacacagttaagatggccacgtcttcatgataaacagaccccttgtattataaatgcccatcttccctccttcaatatttttaatcctgatatctgtttgcattacataaatatagtttattcagctttcttttggtttatgttagcaaggctacctttgccttttaaacaaatctctgtttgtattttctatgtttagtgtgcgttgttgggcctttgtccattctgtcggtctcagcctcttggttgtggtgcttaggccacttcttatgatgttttttgataaatcaaattcctagctattatttttctagatacatattcctcaaatttgaaagttttttaaagttttgattgaaaatagatttttaagctgggccacactcaggaggcaaaggcaggaggatctctgtgagttgaaagccagcttgatctatatagcaagctccaggacagcaaggactacatagaaagatcccatttcaaaaataagtaaatagacatttctcatgcgatatattctgattatagatttcccttattcctctcatatcctgcctacctccccactcactcaaatctacaccctttctctataaaaacaaaatcagcaaaagacaaagcaagcaaacaaaacagaaaggaaaagcacaagaaacatacacaaacacatacacacacacacatacatgcatgcagaaatcccataaaaacagaaaaccagaaactataatttataagcaaagacctagaatgttaaaaagccaaaacaacaacaacaacaagaaaacagacagacagacaaacaaaagacaaattattatgagacaaaaaaaaaaaacttccaaaaatatcactgagttcattttgtgttggtcgtctcctgctgggcataggcctgccctaggtgtggttcctatgcccaccgagacaccatgggagaaatctcatttttcatttgtgagtgcatgttgccatttcccatgtgtacatgtgtctatgttactaaaacccacatatgaaaaactcagagatgattggctatctcatctcctgtagaggtgttgggtgaggatctcgtgggaaaagggaagatctaccagtcctggatgaccttacctgagtctttctgttatctttagtgctttggtgtggtccatcaaagccccagggcagagcctnnnnnnnnnnnnnnnnnnnnnnnnnnnnnnnnnnnnnnnnnnnnnnnnnnnnnnnnnnnnnnnnnnnnnnnnnnnnnnnnnnnnnnnnnnnnnnnnnnnnnnnnnnnnnnnnnnnnnnnnnnnnnnnnnnnnnnnnnnnnnnnnnnnnnnnnnnnnnnnnnnnnnnnnnnnnnnnnnnnnnnnnnnnnnnnnnnnccttccctcctcctcctcttcctcctctgtaaggagtcacaggcagcccaagctagccttgaactcactatataatgaaggatgaccttgaactgcagaactgcagatcttgcctccatctcccagatgttgggattttccaggcacgtgctcctgtgcctagtttatgcggatctgaggacggatcccagggccttgtgcatgctaggcaagcattctaccaactgagctacatccccacccccccagaagctcttcttaactgcttcagacccctgcctggagaaactctccccccgaccataaacacctttcagttctctcttttcatgaatctttgcttcttaattttcccccagtagtggatggaacctgggccccacccagccctctatcactaccttggagctgcatcccagcacagcttcttaattactatgggcttgatgtttgcttctgaagtcgtatcttcctttacagccaaggttggccttggactcagcaatcctcctgcctcagcttcctcaatggtgcgggattacaggtccacccaccatgcccagctcttgtggatgtacttgtggaggaagaaatgtttaaatgtagattgacagaagagaaatgtgggagatgggaccggataatgtgattaactcatttggtggggtcatttagcacagcaaagtggcagttccgggagagaagctgtgtgctcaacctctccatgaagcacctgctgtgtggccaggccctgtacctggcctagggacacacagcagatgacacagagcagatctccatcattgggcacattcgtggaagggaaaagcagaaagccactggaattgaactcaggcctcaggtctgagttctgttgagtcctgtgctctgttgttacacctagtgtcccctgttcctgactagatagaaccctgcctggctcccaagggatggcagtggccccttgggagccaggcagggtgaatatgcttgtagcactcggctcctggttcctggctcctggctcctggctcctggctcctggctccctggctgggagaaaacaaaaacaaaagcaaaaaacaaagaggctcacattaaaccagtcatttcctgctcagaagtgctccgtagtgacatacaatgtcatcatgtatgtacagactgttcccagcagggggcaccactgagtcttctctagacaagctataggatttctttcttccttgggaaatgggatgatgggatgggagtggggtctcagtttccctgatgagatgaagaatgtggctggactcttagagactggatggagctgacattctgcacagcccctgatggcctcggggaatagccactgccccttaggagcaggcacagtcatggggtccagggggtggactcagctggttccccctccatcaggacttgatcttcgacctgggagaccctgtaagatgggagtacatgctcttggggaccgataagcctcacctgtccttgactgaggaggatgaagaagggctggatgatgatgatgatgatgtggaagacctggtgagtctgctagcatgggggtggggcgagggccttcaccccattcggtgccaggcagtctgacagacatccctgcagacatgtgcattctgggagagggaagtccaaatgtatcagtcctacattcttccaagcagaggggtcttgtagagctctcattttacagatgggtaaatagaggcctaagcatacccagtgaccatcccagatcccagaacctctcagtaggttaggggacagacagtacttgaattcaggctctcctatctggagccctgatcaaggcttgaactgttccttagagggaccatacctttggagtgggagccctcagggtccactctgctagctccttcttagtcactggcctggggtatcccctcatcagacttctgtctgtcatctttcaccaaggggtatgtgtgtgggggtggtggtggggtacttcctacatggagaaaggagagactaggaggcaaattccccctgctttaggaatcttccatgtctcctttatgtgtaaaactagggtgagggtcactgtgtttggtatccatagcaacaataacaggtgtatcagtcgcctagcattgccataagggagtactacaaagtggaagttccacactcccagaggctggaaattcaggatcaaaggtgctgctggcagggctggtttcttccaaattcctctgggtttgctggtagccatgagcactgtagctttatctgactctctctctctgaatctgtgtcctttatctcataaggacacttagcatattgcaatagaaccacctgaagacccaatttagactccattgccttacccataaagtccgtacttccaaatgcaacaggattcatagttactggggcggtgtgtgtgtgtgtgtgtgtgtgtgtgtgtgtgtgtgtgtatactttagcatatgattttagaggtaggttgaggaagcccacatcaacaggcaacactgcggggacaggttctgctcctgccgcagaatctgagttcactcatttaaatccccgcttcctgggtagctgaggacagcttatacacagcagagcaaaaggagacaccaaaggtgtctcacccaataagtgagagctaggaaccaaaccccaacagtctggctgccttctcaggggggtgattattcagctctgacggctgcctaagaatgactgaggccagctgggcggtggtggctcacgcctttaatcccagcactcgggaggcagtggcaggcggatttctgagttcgaggccagcctggtctacaaagtgagttccagggcagccaggactatacagagaaaccctgtctcaagaagaaaaacaaacgacaaacaacaaacaacaacaacaacaacacaacaagaatgactgaagtggccctgttctccttctccttgattctgagcactggtgtccctgctggctgtgggctatgtacccttcaactcaggagcctgctccttctggaagccctgtcacatccctggaatgggaatcctggtccctccatcatggacagatgatagatcctgagaatcagccctcagctgcagggccagacctgggattcctgggctgtctcaaaaaagttactattgcttgccgccaacccatcgatcaccttgtgtgatctcaaaagaagtcacaattagatgagcaagcacccaaggcctgagcattgtttctggcaaaagtatatacacaggaaatcttgagctgggtctgaggatcacttgtctagaccaggccttatttcacagaccagggaagaacagccatgcagggcccaagacttattcacaatatctattagtcctcccaagaggcccagtaaacagctaaggaaacctaggcttaagagtggatggaaaacttacccagccctccttacctggtgctaggtacagtcaaagactgtactccctctgactcaggatcccctctctgagtagccattatggctgcaggtggtttggcatgagaaccagtgctaccatcttagaccacgcaaagagggagtaggggtccacccaaacctactcctctcctcccctaacctgggtcatcttctgacttcttgctcttccggggaaactgacagcccccttagcaagtctgggtctggggtaggggaacagaactgtgccatggcctctgctccaaggccctggccagcaaccacctcttttcctcacagggcaaagaagaggaggataagagctttgacatgccgtcttcgtgggtctcccagattgagatcaccccagaaggtctctgtcactcactggttctcagcccacagctcagcagaggagccgtagaggcttcctgggcccttcttcccagcccctctcaacaccctgccagctctgtactcagagcctgaccctacctgccacacaactggactgttaccattatgagcaccgaggtccggggacatggtctctttcttccctttccccggatccccctgttcagaggaggccatgggcagaacatggagtatatggtgccatggggccaggccacaggaaaaaaataggcaaagaaggcaagaggctgggttatcctttgcccaatgtctacatatgcccacctggaaatgcctagatcagaagaagggcataggctgttccagcaggtggcaaagtgctacagaagtggtcatgaaccctggggtaggagcacccattacatcctagataaggcatggaggcaaaatgggtcttaagaggtagtagtcattggggctgggttttgaaggatcagatgtctttctagcacattattctcagtggtgaaggcctggcaggggaaaggagtggctggatcacagatatgattctcaggtagccctgggatgctggctcgcccaagaataccttgggaagagttgaagccagcactggcaggtattttcttcctccttggagctggttctgggcctggaggcactttataggcaacacagacaatggacaagcatccaggaaggggtggaaggaaagaccccagctccctctacatccacagagtttgagacccgttgtcccagtgggaagaaagtgatacagtacaagaaggcacagctggagaagtggtccccatacctcaacaacaacggcctggtgtgtcgcctcaccacctacgaggaccaacagtgtaaggcaccttgggggcacggaatggggaaaacaaggagatgccgtgcttggtgactccgggtaaatcagttctagtgtgtgtgtgtgtgtgtgtgtgtgtgtgtgtgtgtgtgtgtgtgtgtatggcagaggccagaggagctggtctgcctgcagcaaccatctctgtgtccccacaggcacaaaggttctagagataaaggagtggtaccagaaccgggaggatatgctagagctgaagcacatcaacaagaccacaggcctgcacgtggactacttcaagccaggccatccccaagctctgtgtggtgtgtggatcccctggctgggcagaccaagggccgtggttggggaggggcgtttacatacgatgacactgatgggaagaaccgaccctaggcatcacggagggccttgggtggcaagcatgggcattacctctgactctgtaagataaggtggtgtgtggtcagctgaggaagcccagaaagggaagacaccatgaccatcggctctctaggaaagtcaaagccagggccacatgctgttctgtgcctgggatcaggccggaatctcctccagagggtacatgatatgggccacatgtaaagggtctaagaatgctgggccataaagccaactagcaccaccaaagaggcaacgtaggagcagagtggccactgtatggctctatggctaggagtccatgaggtcgggaagaggggaaagaaagaacgtgcctcctgaggtccatatcgtaccccagacttcagcagagaaaagtctggagcctacggacaccgaccacgtttgggagttgaaattttcaagattaaaccaagaagggaccatgccacaacctatgtgtgggcaagtggtcctaacctggtgggtgtgctgggggttgaaagtggcaggaagttgttccttactgataccagccagtcactcttaagaataattgagctaaatgtgttagcaatatggagatatagctcagtgacagaacacgtgcttagcacacctgaggccccgtgtgcactccatctctaaacagcaacattaatggccttaaaatgggagcacgtcttcttccggtaattcctctgctgagaatatgttctcagcagaggctgagcaagaacaataaatgtatgctacagttgttcatcatggtgttgtttataaaaacaaaaacaattaagtgtaactgtagtgcccagaaagtgggggttgggtacacaatggatcctcacgtgtgcttcggaacatgggggcctgggattgggttccagagccagctgccgcagcccttgatgctcacccagccccttcctccctccccttctgccgccccccctaccccccgtgcctcagtgcactcatacaagtctatgctacctgagatggaccgcgtcatggagttctataaaaaaatccgtgtggatggcctggtgaagcgggaggagacgcccatgacaatgaccgagtactatgaagggcgctccgacttccttgcctatcggcacgtcaattttggacccagagtcaagaagctcagccagagcagcgtggagtcgaacccaaggcccatggtggtgagagtacacgtgggctggggactggctgcccaccctcgctggcagatagagagccagcaggatcaggggagccctgactcagggatgatcattaatgcctgtgatttttgccagggttctaaatatgaaacaaccacttttaacaaatgcagacccctgggcttgttaggaccaagccttgtccccagccactagacaaagaagcaaggcttcctcattgtaatgaacaaatacacacataataaccagacatctggaaatatgggaaactaatgaaacggacagatatctcaaataacctctctccaaaattactgtggactagtaggcttgttcatagctggacaactaatcccagcagttgagaggtggtagctgaagagtaaagagttcaaggcaaccctcatctacatagtgagtccaaggctgagccacatgaactcctagctcagtgagccgaggacatagctcactcagtaaagagtttgctttctaagcacgaagacctggatttaatccccggcactcacaaaaacagcctggcactatgacccgcatctgtgatcccagcaccagggaggcaaacatagggtttgttggcctgccagtcaagccaaaccagtgaggtttgagttcaagtgagcccaagttttgagacataaaccctgtctcaaaaaaacaagcaggagaacaattaagaaagacaatgtcaatctctggctaccacacaaatgcgtgtatgcacaccaaggcgctcacacacaatttgttttaaattatattgagatctggggtgagggtttcagctgcttggactcaaactgagctttgtttcctctgagatgctacaaagttcttggccattgaacttcctggccacacaccaaagatgctcctttctgtagtaagggttagctgataatgggacaggctttctggagagctccccgcctctagaagcagacaagcagagtcgtgtggagggaattggagaaaggtccaacaccatgaaaacccacgggggtcatagaatccattgtctagcaggaagggcgcgcacccctggactcctgggtcatgagagtccttccctcctgcccacagagcatgctcagaaaaaccccctcctctgcgtgttctggccacacagaaaatcacagagcggttctcccgcaatccagagaagcccgcggatgaggacgtggcagagcgtttgtttctgatagtggaagagcgcatccagcttcgctaccattgccgcgacgactacatcaccgcatccaagcgagagttcctgcggcgcatggaggtcgacagcaagggaaacaagatcatcatgacaccagaaatgtgcatcagctacgaggtgggtcggtgactgcacggcacacagaaaggttggggacacactttaaaaactgcgcctgcaagcatcttctggtaacttgagagaccctaagtggaatttctatgaaaactaccctggggaaacccatctctgtccctggtaacatgcaaagctctcatctgaggacctttcccttgcaacggctctgaaaatcatcccatttccaccaaaatgaaaaccctatcagatgtaactggaatgcccagagagtgggggttgggcacacgactaatattcatgtgtacttcagaacatccctcaccctgggcctggggttgggttccagagccttcctcatggtccctacctgcacctctggggatcctagaccccagatcccagggacctatcctgaaggtgacaggatattctttcttatgccctagactctaggatggtctcgccttcctcttctaatagcataaccgtaatccccctgcatctttctttggtccctctttgttattatgtttttgtagagaaggatcctggggtctggagaggttaagcaccttgcttgaggccacacagctagaaaaaagggagtagatttaaaccaagtggtccctagacctgccctggcgcagcttccctgtcaccgtggtggttctggtctcaggtagagccgatggagcacactaagaaactcctctaccagtacgagaccatgaatcagctgaagaacgaagaaaagctgtcccgacatcaggcctgggagtcggagctggaggtaaggtcctaccccagacctcggggggggggggtggcgggggggcagggagagagggcctccgcccgtgatgcacctcctccatgatgtctgatcaaggtgctggagattttgaagctccgtgaagaggaggaggaggcacacacgctgaccatctccatctacgacaccaagcgcaacgagaagagcaaagagtatcgggaggccatggtgagtctcccggctcttcctgggtctctctccccggagccctgcctccagggtagggaggatgtgagaaccctgtgtaagggatgatgaggggatgtgccaacccttcacaagggatgatgaagtcgctggtgatgtcaggtgagtattcctgttggctatcacctgctcgttgatgggtcaccctcccacccccatcccaaagagcacttaagatccaggctgggtgtacttacccaggactgtgaccaaatgaaaaagtctctaccttgtgtagagaaagaatgagaactacatgcccacctctaccagggctttcactgaggctgtgacctgagctgggaatccagccaactgactcaggcacaggttgaacaccaagactcagccacgcaatgcagggctttggctttacccactctcgccaagtgggaggaccagtttgggttcccaggctcgaggctaaatcctcttcatcaagcagtgcagatctctaaagaagtttggagttggcctggcaaggcttggctttggaatgttcttggatctataggaaagggcaacagctcctgtcctcatgttctctggctcctgtgtgccccatgtaaggccggccttatgggcaaaagagaaaaatgggagctcagaatctttgctaacccactgccactcactataagtgtctgctttggactttccagacctgagctggtctgttttcagaggaggaaactaaggctcagactgattgatgaattcgtgtcagaaacaggaattacatgttagaaagaaataaacagggagaaggaggcaatcgtgtctcataatcctgggacatggatttagggcctggcttttaccattgcacaatggactcagctgctccggaggtctcctgcatatcccgatctttcagctggttccctggcccacaggagcgcgtcttgcatgaggagcacctgcggcaggtggaggcccagctggactacctggccccattcctggcccagctccctccaggcgagaagctaacccgttggcaggcggtgcgtctcaaggacgagtgtctcagcgacttcaagcagcggctcatcgacaaggctaacctcatccaggctcgctttgagaaggtgtggccagggcccaggcaggggaggtgacctcaccatcctcagtgagaaaatgggacctgaggtctttgctcagtgcctcacggatccgagagtgacagatgagcggatgagtgtgtgtctgtggcatccaaatacctggtttcttctttcccctttgttattgtatgagtggatggatggatggtgggtagctgggtaaatggatgagtggatggatgggttaccaggtggtggtggggtgggcaggtacagttggatgtgcagtgaggattagaagtggagtgtgggtggatggttggttggttggatggatggatggatggatgatggtatggatgggtaactaagatgggcagacagggggatacaagagtggatgggtaggtttgtgaatggatggacggttggatggtacattataatagctcctagtccttggcctgtttccgtgagacaggtgaggtgcgtaccacgtggtccccacgcagtgtcttggtctgcagagtgcagagaagagttgggtggaatgggacccaccttgttttcggagacgaactgctgggggctctgagcacgcccgcaacatgtctagctcatgtagctattttgtgtgtatgggtgttttgtctgtatgtgtgcatgcccaccacatgcatgcctagtgccctcagaggctagaagaggtcatcgcatcccccgggactggagtttcagatgattctgagcctccatgtgcattttgagaatctaaccccagtcctctggagagcagggagtcccctgcttcattttttgagacagggtttcactctttggccttcactgacctggaacttgctgtatagaccagactggccttaaactcacaaagatccatctgcctctgcctaatgggagctgggattaaaggtgtgcacatcccacccagttgttttgattttatatatgagctgctaggagtggaacccagggccatgcactaaaccacatccctagctctcgctgactgttttggccctgttctgatttcatgcacatgctgtcctttaaatcatgaccccagcagtttccacccaagatattttgggatgctctaactgtgtccctttccttgggggtccgggttggggtgttatcctcttgaggctgcctggtcatctatggaactacagcctggctgcagatcagttcgcacattcccatgttcatctctgtatgcttccaggagacccaggagctgcagaagaagcagcaatggtaccaggagaaccaggtaaccctgacgccggaggatgaaaacctgtacctgagctactgttctcaggccatgttccgcatccgaatcttggaacagcggctcaatcggtaaggggcagagccgggaggactcctgggagcactctgatagcttggatatccctcaccttctcctccctccctctgctcaggcacaaagagctggctccactgaagtacctggcgctggaggaaaagctctacaaagacccacgcttaatagacttcgtaaaagtctttgtttgatggcccctcctggaactacggcagaccctgccagagaatggagtctctcccttctccccaaccactatgatcctatactagcctcgctgccacactacctccctatccctcatagcctccctcaaataaatgcatttcctgtttgccatt

SEQ ID NO: 1065 - DNA, 2814 bp, Mus musculus
gtaacagtaaggctgttcttggaggctgtcaggatggaggtcctgagagagaaagtggaggaggaggaggaggctgagcgtgaagaagcagccgagagggccgaacggactgagaagctggagagggtgacaaagtccgccgaagtgagcagagaggggaccatcctgagccaggatgagcttcgagacctggaggggaagctgatggccatcgagatccctacccaagctgatcactcggtcataagccaggcccctgttgatgtcaccaagctgcctccttcctataccaccaactcattgaaggaggagcacctgctgctggtggcagacaacttctcccgccagtacagccacctgtgtccagaccgcgtgcctctcttcttgcacccgttaaatgagtgcaatgtgcctaagttcgtgagcaccaccctgaggcccacactgatgccctaccctgaactctacaactgggacagctgcgcccagtttgtatctgacttcctcaccatggtcccactggttgatcccctcaagccgcccacgcacttatattcctcgaccaccgtgctcaagtgccagaagggaaactgctttgacttcagcaccctgctctgctccatgttgattggctccggctatgatgcctactgcgtcaatggctatggctcactggacctgtgcctcatggacctgacaagggaagtgtgtccgctcactgtgaaggccaaagagatagtcaagaagaaagagaagacggtgcctaagaaatactccatcaagccgccccgggacctgaccagcaagtttgagcaggagcaagaggagaagagaatacaggagatcaaggatctagaacaaaggcgacttaaggaagaggaagatcgcatcctggaggcagagaaagcgaagcccgaccccctgcatggcctgcgggtacactcctgggtcctggtgctggcaggaaagcgagaggtgcctgagagcttcttcatcgaccctctgactgcacgcagctacagtaccaaggatgagcacttcctgggcattgagagcctctggaaccacaagaactactggatcaacatgcaggattgctggaactgctgcaaggacttgatcttcgacctgggagaccctgtaagatgggagtacatgctcttggggaccgataagcctcacctgtccttgactgaggaggatgaagaagggctggatgatgatgatgatgatgtggaagacctgggcaaagaagaggaggataagagctttgacatgccgtcttcgtgggtctcccagattgagatcaccccagaagagtttgagacccgttgtcccagtgggaagaaagtgatacagtacaagaaggcacagctggagaagtggtccccatacctcaacaacaacggcctggtgtgtcgcctcaccacctacgaggaccaacagtgcacaaaggttctagagataaaggagtggtaccagaaccgggaggatatgctagagctgaagcacatcaacaagaccacaggcctgcacgtggactacttcaagccaggccatccccaagctctgtgtgtgcactcatacaagtctatgctacctgagatggaccgcgtcatggagttctataaaaaaatccgtgtggatggcctggtgaagcgggaggagacgcccatgacaatgaccgagtactatgaagggcgctccgacttccttgcctatcggcacgtcaattttggacccagagtcaagaagctcagccagagcagcgtggagtcgaacccaaggcccatggtgaaaatcacagagcggttctcccgcaatccagagaagcccgcggatgaggacgtggcagagcgtttgtttctgatagtggaagagcgcatccagcttcgctaccattgccgcgacgactacatcaccgcatccaagcgagagttcctgcggcgcatggaggtcgacagcaagggaaacaagatcatcatgacaccagaaatgtgcatcagctacgaggtagagccgatggagcacactaagaaactcctctaccagtacgagaccatgaatcagctgaagaacgaagaaaagctgtcccgacatcaggcctgggagtcggagctggaggtgctggagattttgaagctccgtgaagaggaggaggaggcacacacgctgaccatctccatctacgacaccaagcgcaacgagaagagcaaagagtatcgggaggccatggagcgcgtcttgcatgaggagcacctgcggcaggtggaggcccagctggactacctggccccattcctggcccagctccctccaggcgagaagctaacccgttggcaggcggtgcgtctcaaggacgagtgtctcagcgacttcaagcagcggctcatcgacaaggctaacctcatccaggctcgctttgagaaggagacccaggagctgcagaagaagcagcaatggtaccaggagaaccaggtaaccctgacgccggaggatgaaaacctgtacctgagctactgttctcaggccatgttccgcatccgaatcttggaacagcggctcaatcggcacaaagagctggctccactgaagtacctggcgctggaggaaaagctctacaaagacccacgcttaatagacttcgtaaaagtctttgtttgatggcccctcctggaactacggcagaccctgccagagaatggagtctctcccttctccccaaccactatgatcctatactagcctcgctgccacactacctccctatccctcatagcctccctcaaataaatgcatttcctgtttgccatt

SEQ ID NO: 1066 - protein, 870 aa, Mus musculus
MEVLREKVEEEEEAEREEAAERAERTEKLERVTKSAEVSREGTILSQDELRDLEGKLMAIEIPTQADHSVISQAPVDVTKLPPSYTTNSLKEEHLLLVADNFSRQYSHLCPDRVPLFLHPLNECNVPKFVSTTLRPTLMPYPELYNWDSCAQFVSDFLTMVPLVDPLKPPTHKSTTVLKCQKGNCFDFSTLLCSMLIGSGYDAYCVNGYGSLDLCLMDLTREVCPLTVKAKEIVKKKEKTVPKKYSIKPPRDLTSKFEQEQEEKRIQEIKDLEQRRLKEEEDRIAEKAKPDPLHGLRVHSWVLVLAGKREVPESFFIDPLTARSYSTKDEHFLGIESLWNHKNYWINMQDCWNCCKDLIFDLGDPVRWEYMLLGTDKPHLSLTEEDEEGLDDDDDDVEDLGKEEEDKSFDMPSSWVSQIEITPEEFETRCPSGKKVIQYKKAQLEKWSPYLNNNGLVCRLTTYEDQQCTKVLEIKEWYQNREDMLELKHINKTTGLHVDYFKPGHPQALCVHSYKSMLPEMDRVMEFYKKIRVDGLVKREETPMTMTEYYEGRSDFLAYRHVNFGPRVKKLSQSSVESNPRPMVKITERFSRNPEKPADEDVAERLFLIVEERIQLRYHCRDDYITASKREFLRRMEVDSKGNKIIMTPEMCISYEVEPMEHTKKLLYQYETMNQLKNEEKLSRHQAWESELEVLEILKLREEEEEAHTLTISIYDTKRNEKSKEYREAMERVLHEEHLRQVEAQLDYLAPFLAQLPPGEKLTRWQAVRLKDECLSDFKQRLIDKANLIQARFEKETQELQKKQQWYQENQVTLTPEDENLYLSYCSQAMFRIRIQRLNRHKELAPLKYLALEEKLYKDPRLIDFVKVFV

SEQ ID NO: 1067 - DNA, 57921 bp, Homo sapiens
  misc_feature (1)...(57921): n = A,T,C or G
acacgccggcccagggctcatcaaatggtgcacttaatttttctgtgtggcccatgggtgtgaaccttgctttctacctaatgcacactcacactaggactcgggggagcacaccgtcctcccgcttcccctgccctcccccaaacttcccttttcctctctcctgacttccactcttcggtttcagaacatgaccctcacctgtgtattctgggatgtgactaaaggtagggcccggaggaccttctctggggtaagacaggaagggagggtatgggctgcattgtggggcggggctagctccactggctgagtccctcccctgccttcctctccataccacatacctctatataaattacctcaatcacatacatttcacattccactatttacattccattcaacatattataattatacacaccttctatccaccaattctcttatacgcgctacagtacttatatccctagatcagcagtaggtgagaaacagaaaaactacagatctcaacgcacaccagacgtcccacgtgacatttacatactatagaaccacactacgagatagtagatggagactatttaaacactagatagacacgagactagactaacagcacatacacagacgagactacagacacgctatacgctagagagaatagatacacgacagtatacagatagaaacagattagacagacacatctgtgattacagacagcacacacaccacagagagaagagagacacaatctctagatacagagcatagactatagagagacatgacattacagaatcgtagaaagacgagactacactatagaagagactattatacagcagtgtagacatgtagacgagactactcaacttatcatcacactatcactcgactagactagaacacagttgtaaaccacgaatattagatgaggattacaccacttcgagaatagaagcccacaatgcattccgagatcactagctctatattcaaccgcatcagcatgacgtgtactacgtactactactcttccaccaggtataagtacaacaacattattcataaagattgagtatcaacatcagcgtatgactagcaagtcttaacacgaatcaagacaacgattacacaatgattacacactgagacgtataactatacatgcaaaagcactatcgcattctaacgtacatatcactatcgtctcatatacaactatggaccgtgcatggaattagatataactgacgaacgaacgactcatgtcttacaacaacgcacgaacgcagataggatatcactctagcatcgtctacatatgattatacaacgacaattcgacgaatctatgctatctagctagaactaaacttctctactaatgaagacatgtatgtacgtcgcaagtctagaactcgatctactatctatcatctactcttcatactatcgacatactatgatctctatgtattatcacgtatgtatactaccatacgtactcgaccatatccagctaccgctcgctaatcatcgtcacgtctcggtcatcataactctacttccgcgtnnnnnnnnnnnnnnnnnnnnnnnnnnnnnnnnnnnnnnnnnnnnnnnnnnnnnnnnnnnnnnnnnnnnnnnnnnnnnnnnnnnnnnnnnnnnnnnnnnnnnnnnnnnnnnnnnnnnnnnnnnnnnnnnnnnnnnnnnnnnnnnnnnnnnnnnnnnnnnnnnnnnnnnnnnnnnnnnnnnnnnnnnnnnnnnnnnnnnnnnnnnnnnnnnnnnnnnnnnnnnnnnnnnnnnnnnnnnnnnnnnnnnnnnnnnnnnnnnnnnnnnnnnnnnnnnnnnnnnnnnnnnnnnnnnnnnnnnnnnnnnnnnnnnnnnnnnnnnnnnnnnnnnnnnnnnnnnnnnnnnnnnnnnnnnnnnnnnnnnnnnnnnnnnnnnnnnnnnnnnnnnnnnnnnnnnnnnnnnnnnnnnnnnnnnnnnnnnnnnnnnnnnnnnnnnnnnnnnnnnnnnnnnnnnnnnnnnnnnnnnnnnnnnnnnnnnnnnnnnnnnnnnnnnnnnnnnnnnnnnnnnnnnnnnnnnnnnnnnnnnnnnnnnnnnnnnnnnnnnnnnnnnnnnnnnnnnnnnnnnnnnnnnnnnnnnnnnnnnnnnnnnnnnnnnnnnnnnnnnnnnnnnnnnnnnnnnnnnnnnnnnnnnnnnnnnnnnnnnnnnnnnnnnnnnnnnnnnnnnnnnnnnnnnnnnnnnnnnnnnnnnnnnnnnnnnnnnnnnnnnnnnnnnnnnnnnnnnnnnnnnnnnnnnnnnnnnnnnnnnnnnnnnnnnnnnnnnnnnnnnnnnnnnnnnnnnnnnnnnnnnnnnnnnnnnnnnnnnnnnnnnnnnnnnnnnnnnnnnnnnnnnnnnnnnnnnnnnnnnnnnnnnnnnnnnnnnnnnnnnnnnnnnnnnnnnnnnnnnnnnnnnnnnnnnnnnnnnnnnnnnnnnnnnnnnnnnnnnnnnnnnnnnnnnnnnnnnnnnnnnnnnnnnnnnnnnnnnnnnnnnnnnnnnnnnnnnnnnnnnnnnnnnnnnnnnnnnnnnnnnnnnnnnnnnnnnnnnnnnnnnnnnnnnnnnnnnnnnnnnnnnnnnnnnnnnnnnnnnnnnnnnnnnnnnnnnnnnnnnnnnnnnnnnnnnnnnnnnnnnnnnnnnnnnnnnnnnnnnnnnnnnnnnnnnnnnnnnnnnnnnnnnnnnnnnnnnnnnnnnnnnnnnnnnnnnnnnnnnnnnnnnnnnnnnnnnnnnnnnnnnnnnnnnnnnnnnnnnnnnnnnnnnnnnnnnnnnnnnnnnnnnnnnnnnnnnnnnnnnnnnnnnnnnnnnnnnnnnnnnnnnnnnnnnnnnnnnnnnnnnnnnnnnnnnnnnnnnnnnnnnnnnnnnnnnnnnnnnnnnnnnnnnnnnnnnnnnnnnnnnnnnnnnnnnnnnnnnnnnnnnnnnnnnnnnnnnnnnnnnnnnnnnnnnnnnnnnnnnnnnnnnnnnnnnnnnnnnnnnnnnnnnnnnnnnnnnnnnnnnnnnnnnnnnnnnnnnnnnnnnnnnnnnnnnnnnnnnnnnnnnnnnnnnnnnnnnnnnnnnnnnnnnnnnnnnnnnnnnnnnnnnnnnnnnnnnnnnnnnnnnnnnnnnnnnnnnnnnnnnnnnnnnnnnnnnnnnnnnnnnnnnnnnnnnnnnnnnnnnnnnnnnnnnnnnnnnnnnnnnnnnnnnnnnnnnnnnnnnnnnnnnnnnnnnnnnnnnnnnnnnnnnnnnnnnnnnnnnnnnnnnnnnnnnnnnnnnnnnnnnnnnnnnnnnnnnnnnnnnnnnnnnnnnnnnnnnnnnnnnnnnnnnnnnnnnnnnnnnnnnnnnnnnnnnnnnnnnnnnnnnnnnnnnnnnnnnnnnnnnnnnnnnnnnnnnnnnnnnnnnnnnnnnnnnnnnnnnnnnnnnnnnnnnnnnnnnnnnnnnnnnnnnnnnnnnnnnnnnnnnnnnnnnnnnnnnnnnnnnnnnnnnnnnnnnnnnnnnnnnnnnnnnnnnnnnnnnnnnnnnnnnnnnnnnnnnnnnnnnnnnnnnnnnnnnnnnnnnnnnnnnnnnnnnnnnnnnnnnnnnnnnnnnnnnnnnnnnnnnnnnnnnnnnnnnnnnnnnnnnnnnnnnnnnnnnnnnnnnnnnnnnnnnnnnnnnnnnnnnnnnnnnnnnnnnnnnnnnnnnnnnnnnnnnnnnnnnnnnnnnnnnnnnnnnnnnnnnnnnnnnnnnnnnnnnnnnnnnnnnnnnnnnnnnnnnnnnnnnnnnnnnnnnnnnnnnnnnnnnnnnnnnnnnnnnnnnnnnnnnnnnnnnnnnnnnnnnnnnnnnnnnnnnnnnnnnnnnnnnnnnnnnnnnnnnnnnnnnnnnnnnnnnnnnnnnnnnnnnnnnnnnnnnnnnnnnnnnnnnnnnnnnnnnnnnnnnnnnnnnnnnnnnnnnnnnnnnnnnnnnnnnnnnnnnnnnnnnnnnnnnnnnnnnnnnnnnnnnnnnnnnnnnnnnnnnnnnnnnnnnnnnnnnnnnnnnnnnnnnnnnnnnnnnnnnnnnnnnnnnnnnnnnnnnnnnnnnnnnnnnnnnnnnnnnnnnnnnnnnnnnnnnnnnnnnnnnnnnnnnnnnnnnnnnnnnnnnnnnnnnnnnnnnnnnnnnnnnnnnnnnnnnnnnnnnnnnnnnnnnnnnnnnnnnnnnnnnnnnnnnnnnnnnnnnnnnnnnnnnnnnnnnnnnnnnnnnnnnnnnnnnnnnnnnnnnnnnnnnnnnnnnnnnnnnnnnnnnnnnnnnnnnnnnnnnnnnnnnnnnnnnnnnnnnnnnnnnnnnnnnnnnnnnnnnnnnnnnnnnnnnnnnnnnnnnnnnnnnnnnnnnnnnnnnnnnnnnnnnnnnnnnnnnnnnnnnnnnnnnnnnnnnnnnnnnnnnnnnnnnnnnnnnnnnnnnnnnnnnnnnnnnnnnnnnnnnnnnnnnnnnnnnnnnnnnnnnnnnnnnnnnnnnnnnnnnnnnnnnnnnnnnnnnnnnnnnnnnnnnnnnnnnnnnnnnnnnnnnnnnnnnnnnnnnnnnnnnnnnnnnnnnnnnnnnnnnnnnnnnnnnnnnnnnnnnnnnnnnnnnnnnnnnnnnnnnnnnnnnnnnnnnnnnnnnnnnnnnnnnnnnnnnnnnnnnnnnnnnnnnnnnnnnnnnnnnnnnnnnnnnnnnnnnnnnnnnnnnnnnnnnnnnnnnnnnnnnnnnnnnnnnnnnnnnnnnnnnnnnnnnnnnnnnnnnnnnnnnnnnnnnnnnnnnnnnnnnnnnnnnnnnnnnnnnnnnnnnnnnnnnnnnnnnnnnnnnnnnnnnnnnnnnnnnnnnnnnnnnnnnnnnnnnnnnnnnnnnnnnnnnnnnnnnnnnnnnnnnnnnnnnnnnnnnnnnnnnnnnnnnnnnnnnnnnnnnnnnnnnnnnnnnnnnnnnnnnnnnnnnnnnnnnnnnnnnnnnnnnnnnnnnnnnnnnnnnnnnnnnnnnnnnnnnnnnnnnnnnnnnnnnnnnnnnnnnnnnnnnnnnnnnnnnnnnnnnnnnnnnnnnnnnnnnnnnnnnnnnnnnnnnnnnnnnnnnnnnnnnnnnnnnnnnnnnnnnnnnnnnnnnnnnnnnnnnnnnnnnnnnnnnnnnnnnnnnnnnnnnnnnnnnnnnnnnnnnnnnnnnnnnnnnnnnnnnnnnnnnnnnnnnnnnnnnnnnnnnnnnnnnnnnnnnnnnnnnnnnnnnnnnnnnnnnnnnnnnnnnnnnnnnnnnnnnnnnnnnnnnnnnnnnnnnnnnnnnnnnnnnnnnnnnnnnnnnnnnnnnnnnnnnnnnnnnnnnnnnnnnnnnnnnnnnnnnnnnnnnnnnnnnnnnnnnnnnnnnnnnnnnnnnnnnnnnnnnnnnnnnnnnnnnnnnnnnnnnnnnnnnnnnnnnnnnnnnnnnnnnnnnnnnnnnnnnnnnnnnnnnnnnnnnnnnnnnnnnnnnnnnnnnnnnnnnnnnnnnnnnnnnnnnnnnnnnnnnnnnnnnnnnnnnnnnnnnnnnnnnnnnnnnnnnnnnnnnnnnnnnnnnnnnnnnnnnnnnnnnnnnnnnnnnnnnnnnnnnnnnnnnnnnnnnnnnnnnnnnnnnnnnnnnnnnnnnnnnnnnnnnnnnnnnnnnnnnnnnnnnnnnnnnnnnnnnnnnnnnnnnnnnnnnnnnnnnnnnnnnnnnnnnnnnnnnnnnnnnnnnnnnnnnnnnnnnnnnnnnnnnnnnnnnnnnnnnnnnnnnnnnnnnnnnnnnnnnnnnnnnnnnnnnnnnnnnnnnnnnnnnnnnnnnnnnnnnnnnnnnnnnnnnnnnnnnnnnnnnnnnnnnnnnnnnnnnnnnnnnnnnnnnnnnnnnnnnnnnnnnnnnnnnnnnnnnnnnnnnnnnnnnnnnnnnnnnnnnnnnnnnnnnnnnnnnnnnnnnnnnnnnnnnnnnnnnnnnnnnnnnnnnnnnnnnnnnnnnnnnnnnnnnnnnnnnnnnnnnnnnnnnnnnnnnnnnnnnnnnnnnnnnnnnnnnnnnnnnnnnnnnnnnnnnnnnnnnnnnnnnnnnnnnnnnnnnnnnnnnnnnnnnnnnnnnnnnnnnnnnnnnnnnnnnnnnnnnnnnnnnnnnnnnnnnnnnnnnnnnnnnnnnnnnnnnnnnnnnnnnnnnnnnnnnnnnnnnnnnnnnnnnnnnnnnnnnnnnnnnnnnnnnnnnnnnnnnnnnnnnnnnnnnnnnnnnnnnnnnnnnnnnnnnnnnnnnnnnnnnnnnnnnnnnnnnnnnnnnnnatatgattgacaaggaggaggaggaggaagaaggaggaagaaggaggaggaggaagaaggagggagaaggaggaggaggaggaagaaggagggagaaggagggagaaggaggaggaggaagcagaaaaaagaagaagaataagaattatcatctggtcccagcccccagtctcaaggaaaatcctgggttgcagagtttcccaaactgcttagtgggatgcttagtgcttgttgtgggaccaacaagaccgcaagtcctggatggctgggcctcctggctcagaaggagagggcagataagaaggtgtggctagcattgggggtgcactgcttttctggcttgctctccatcctggggctaggcaggggctgaggggctggagttcctcatcacctgcggttcctgcaaaagcagctccaagtgccatgttgagcacccataaggccaagggggctatggtgaaaatacaccccaaagcccagagcagatggatggagttcctccgtcattgcacagcagcaatagcaacctaggaggtgggccatcatcacaggtgggagcacagaccctgatctccgttcaccagtttcaaattctgtctttgcaacttgtcttgggcaaattcttcaactactgagcctgtaaagcagaaacagcagtagctgccccacagggttaatgaaggaaatgaataaatgagacagtgcctgcaaggactgcccactgcctggcctgcctggcccagaatgaatgtgacaaagccagagctttgccttggccatcatctcatcaggtcctgggtacagagagggtcccttctgccatggctcctgcctggttctctcttctgcccaaatctcttcattccttgtattttttcattacaacataacaaatacacaggaaaaaagaagacttatttgctccatgctgtcagataggcaacactaaaagatataaatccttcatcagttaatgaattcaatgaaattacagtaaagattttggggcgggcacggtggctcacatctctaatttcagcactttgggaggctgaagcaggaggattgcttgagcccaggagttccagaacagcctgtgcaacatagcaagaccctgtctctacaataaaataaaataagggaaaaaaataaatattctaatttatttttttttgcttctccagaaacttttaaaattgatatggaggcatatagacctcaaatagctaagtcaatcttaatgaaagagggcatacaggaggtggaggttgcagtgagtcgagatcatgcctgtgcactctagcctgggcgacagagctagaccctgtctcagaaagaaaaaacagaaagaggggcatagaaggaagacttgacctctagacataaagatattacaaggccagtttggtaaatgcaacgtggtgtctgtgcagggataggaaagaagatcagtggaacagcacagagtgctcagaggcagacccatggacacctgggggatttaatacgtgacaaaggtggcatcattattttcagaggaggaaatacctaaaactaacacattagttcatgaagacacatttaaaatcattagtcatcagagagctgcagactgaaatgacaatgagacctcattgtatccttattaaactgatgaactagaaagctagatggtaccaatgggcagggacgatatgggagccagggagagtctagactgcttcagctgcctggagaaaaacacagtgcttctgctgagccagcaatcttgctactggttgtttatcttgaagaaacattcttccagatctagacccctctagacctgtgtagcattgtctgtgatggaagggagctggtagcaaatctgagtggtctgtccagcccacccaatgtctgctggggagttccctcaagactgccccaaaccgtcaagaggtagggccagttggaattccaaagaaataaacactaagcgccggggtgatccgtatccatccaaagcatttattagggaaacgtacatagggaaggctgtagtgttctcatgacagacagcaagaagggagatgagtctgttcataacgaggaggtgggtttatggagtttatatgagtgtttaagggattcggttcagggctggggcacgtttagcatttgtttgatctttccatgtttccagcaacaacctaaacaactatcagtgcctggggacattgaaagctccctctagaacacctggacaccgagtgcccgtcactggaaggacgaagaggtaataagtgtggatccacacaataacgtggagagatcttaaaaacacagcccttcatgaaaatataagaaccagaaggatatatttgttcagtctcatattaaacatatattaaaaacaccagcatgccaaacaatactcattttggaaaaaaaaaatacacatcagaatggttactttatagaggtgggaaatgaaagtgggtatgaagagaaaaaggaatgaataaatatgtaaaaggaatgaagtgttgcatagggttgaaaaaggacaatgaagcctatgctgcatcccactagcataacgcatcacctgttttcctttctcctccctcctcccttcctgccttcatcccagccagttccccacagaggtaattacgagttgcttagcaccaagtctgaaatactacacacactgtctcgtgagctctccacagtgcaattgatcctttagcaccaagtctgaaatactacacacactgtctcgtgagctctccacagtgcaattgatcctttacagcttatttttatggctgcatgatattccagctgggagggggaacatcattctctattcatgagaattgaggcaattcctaagtttctagcagtaacactaactgtgcaaacttgtcagcacagtgacagtctggattccctcctggcagccctatcccctgaccaaaaaaggcccatgcacccctccctccaaaaataaaacagtgaagattatattttaggactgtattggtaaaaacacagatataattcagggcagattcacacttatatagtcattattattctcatttttttcttctgaatttaaaagaaattaaacattttcatgagccactagcctaatggataggttttccccgtacttcgaggtaatgttctacatcacagctccggcctggactagaacccaggactcagtcaaggcagcctggttctgtccaccgcagctggcagctactccaggccccacactggtttctgtctgtctcgatcaaggccacattcggcatgccgtggggcaggggctgtgctgtgctggtaaatgtttaacaactggctggctcagaggaaaagccctggtcttggcgtttgctaatttttgtggtgtaaataaccccatggccaattttttttttttttttttttagagaggttctcactatatattgcccaggctggttttgaactcatgggctcaaaggattctcccgccctggcttcccaaagtgctgggattacaagtgtgagccaccgtgcccagccctcttaatttttaataatggctgtgtttcacaaaaattttggaaagtttaacaactatcaagttgatgccccactataccagtgcaccgctggcagaaggacccatgaaacctgggaagactacatttcccagaagcctcctctcccaggaccggcgttcagcttcccaggttgttaccatggagatggctaacagctagagcaggctgtcctcggaggggtgaggagggagcaagggacttggggtggctggaccctgtctggcagggaaagggtgaggctggtggcccccttctgcctgggggcctccagccctgatctttctggggaagttgttggtggggtgtgtgtgcgtgtttatgtgtgttgggaggaggaagttgctggtggagagggggtgcagggaagggccggtgggttggggcagaatctaaggaaccttgagataagactgccttccccacactgggctatagctgaagaggccacctgtgtagggaataaagtgctgtgggttcttctccccagctctgcctctgatggtgttctgggactgacacgtcggcttcctcttcagcctacttctttccttgcccaccactcccccacccccaccatcccttctagcacttccccatctcatatctcttccagcctgagacacacaggtttcacaaccagaaatacaggggttcaaatcccagacctgctacttactggctgtaccttaagcagtgcacttaacttctctgggccccaatcttctcatctgcaaagtgggtgtcctcagtgtctgcctcatagagtcagtagaggataagtgagatgatctccgtacaaccctcagcacaggtctgacacacagtaggcattcagcaaactgtaaatgccttgtaatggtgatgactgcccttcctgggctcattgtctctgggaccaagaggccaacaaatggatctgatcactgagaagtgctgcttggctagaggttctcccctgaggatctggggtcctgaatggtgttgggctacctaggccttgggtggcttccagccagatgagcattcgtcccctcctgagtcccagagcacagaatgtcagaattggacagaaaatatctgccctcccttcctactataaagagaaactaaggcacagaaaggcgcagacagtgacccaagggtccagcaggagctactggcaaagccagggtttccccaaccaggctcagtcgtggctggtggccagggactcacctccctaggaggccgaggtggcccatgtgggtgtggagttggaaattggggccagcctttatctgctgctcccttctgccctcttgctcctggcttcacccagggaagtgggggatgattagaaaatcaaggggattctgctttttttccttactactcgccccctttgtcctgtgggtttcgtttgttttcctcatctctggacccccatttgccgtaaggaaaacagatgttcgaggacagaaatggaaagaccccagctgggaggctgcagatagtgcatcagctgggatggcgttgggtggtgtggaacagggacccccatagaagctgaggtttcttatataaggaaaggctagaggtggcactccaggcctctgtggcactgctggggaccccagctcccccatctctcggccctgccgtccatagcaggcagctttagccctcatgtgtggccacctcatggtctcgccttggctgccccacctcccactttatctccacattccaggtgggaggaggagaagggcagagggctccccaatcacttctgcccacatctcattggccagaaccgggtcacatcgcagggccacctctagctgcaagagaatctgggaagctgagcaattcaaaccaggcacactgctgccccccacacaactggggttctgccgtatagaagaggagactggatctttgggtaggtgactagcagtccccgctcagtgtggctctgctctgtgaccacaggacatatggtgagcacatgtggcgtctctgcgtggatcacagaatgaagcctgttctctgggccaacacaggccttggccaagagagagtaggctgtgttacccccaccccccactccctgtttgtatgccctggtgcaggcaccttcactctctgtgcctcggttcccagtttgatcaggtgagatatcattcacctgccatcctcatttttgggtgggttgtagatcatatcaccttaccgttaggattttctttaaaccaatctatttatttattatttatttgagacagagtctcactctgtcacccaggctagagtgcagtggtgcgatctcaacttactgcaacctctgcctcccaggttcaagtgattctcctgcctcagactcctgagtagctgggattacaggcgtgtgccaccacgcctggctaatttttgtatttttagtagagacggggtttcgccatattggccaggctggtctcgaacttctgacctcaagtgatccacctgcctcggcctcccaaagtgctgggatcacaggcatgagccaccgcacccagccaattcatttatttaaataagaaacttgacaatactatagtaatccccacagcattcacagtacttgtcattgataactgtcagctggcacaatggctcatgcctgtaatcccagcactttgggaggccaaagcaggaagatcgcttgaggccaggagtttgagcctgggcaacatagccagaccctgtctctaccaaaaaaaaaaaatagccaggtgtggtggtgtgcacctgtggtctcagctactggggaggctgaggtgggaggattgcttgagcctgggagtttgaagctgcggtgagccatgatcgtgctgctgcactccaagcctgagtgacagagcaagaccctgtctcaaaaaaataaaaaatttaaaaaaaaagataactgtcaaatatactaaaagcaaatcgacacgtgcctttccctgtcctgtcctgaggatggcttccaaccggaggcctgctttgtctttgttgtaaaggaatatttgccaggattagaaaggtgttacagatggggtagcaccaaacagagactttctccatgtttgaaaggaagtcaaagagggaatcactccctatgtgttcgacacctcctcaaaaccatctcccaggcctcccggggatgcccagatggtgttggtggctcctgcctgggctgacagtcggccatggagtatacttacccttccccacagagacattccatctccagacacccagagacgctccagaatggaggtcctgagggagaaggtggaggaggaggaggaggccgagcgggaggaggcggccgagtgggctgaatgggcgaggatggagaaaatgatgaggccagttgaggtgcggaaggaggaaatcaccttaaagcaggagacgctcagagacctggagaagaagctgtcagagatccagatcactgtctcagcggagctcccgtgagtgtggcagggtgggggccctggcaagggtagaccggggctgggcacagggagacccaggcagagtgctggtgcctggtctggtagggtgaccaggagatagagggaagcagttatgagtgaaggctttctgctttcaaatggcctgggccgagtgtccatgctctcccaactagctgtgtgaccttgggcaagtcactcagcctctcggtgcctcagtgcctttatctgtctaaaagtgcaggtgctggccaggcgctgtgtctcacatctgtagtcccagcactttagaaggaaaaggtgggaggatcgcttgaggccaggagttcgagaccagcccgggcaacatagcaagacccccccacccatgtctacaaaaaatacaaaaattagccaggtgtggtggtgcctatagtcccagctacttgggaggctgaggtgggagggtcacttaagcccaggagttcaaggctgcagtgagctatgattgtgctatcacactccagcctgggcaacagagcaagacctgtctcttaaatatatatatgaaaatgtgcagatgttaatgatacctgccttctcagtagccgtgaggattaaatgaggaaggggtagagccaatggcaactcagtggaaccagggctcctgtgtgccaggcatggcttccctaatgccatccctgttgtggcacagggcctttaccaaggacactattgacatctccaagctgcccatttcctacaaaaccaacacacccaaggaggaacacctgctgcaggtggcagacaacttctcccgccagtacagccatctgtgcccggaccgcgtgcccctcttcctgcaccccctgaacgagtgtgaagtgcccgtaaggctggcatgttgagggcagggctggggagcctggggctggagagcagagggcacagggaagtggggcaggttctccaaggtcactgggccaaatcacggacctcctgtgggccagagcgcttctagtctgggggcaacataaagtcgaacgccagcaggcctcagcaggctcagtgcagattaccctggagggcggtggtggtctggagaccccatgcccccgcctaaagaggcagctgctgattgctgcggggaaactgcaggcctggggttacctgatcaagaggagactcgggatttgtgtgggagtctctggtttttaaatgctggcagctgacataaatgctaaacattgccacgtgggccaaataaagcgggtctgtgggtccctgtcagctcgtgggcagctgtttcccaccccctggatgaatcccatgtcattccatctacagatggagaaactgaggcccagaaaggctcagagacatgctctgggtcacagggctggaaggaaaaagccagagcttaggttcttatgcctgtcctggtccaatttgtcttatttctctgtccttccctggacaggctgacctctgaggcttcagactgtactggtcgccagctggccccagcccagaacctctgtaggccccagggagagcatcgctcctgggaggagagcacagtgctcccaggaaccccaggaaacagacctgatctcctcattcagccctgacttgctgggtcacctcaggcagctctcaagcctgctctgggcctcaggtgtctccacaatgccctaggggttgaaggcggcaaaacttcaaagcccttcaaagtccagatccagaatatgcttgtgctgtctccgggtgctggcaacatgataagggcctcccagtcattgccactgcgccactgatggctgccatgtgccagatctgggcatcaccttcccagccaagggctgctctgccaccccaggtcatgtgggcctggcctcctgcatttgctcaggcctctagggtccccctgtggattcaaggaaggccccaagcttgatctcacaagttcttattgccttgaccccactggcaccatctctctccttgcagaagttcgtgagcacaaccctccggcccacactgatgccctaccccgagctctacaactgggacagctgtgcccagtttgtctccgacttcctcaccatggtgcccctgcctgaccctctcaagccggtaagcaccactcacaggctgcatgcctgagcccaccaggactaagatggtgtgagaaacaaactcacccatccaaacccaaagaatggacttagaggccgggcgtggtagctcatgcctgtaatcccagcattttgggaggccaaggcgggcagatcacaaggtcaggagtttgagaccagcctgaccaacatggcgaaaccccgtctctactaaaaatacaaaaattagcagggcgtggtggcacatgcctgtaatcctagctactggggaggctgaggcaggagaatcgcttgaacctgggaagcggaagttgcagtgagccaagatggcaccactgcactctagcctgagtgataagagcaaaactctcaaaaaactctctcaaaaaaaaaaaaaaaaaaaagaatggacttagagacctggagaacagcgaaagtgagacttttaatgatggtcttgcaagattgggtgtctgataggcagacacacccagcatagttttaacaagcagtttatcccctagtgcgcaggtccctcccctggttcctcacaggctgagtactatggggtcacaatcttcccagacatcgcctattgattgttaggcaggggctttaggtgttttttctagggttgttttgcagcattttattgcaacccacaatgcattgcaatcctagttagctcaggggctctttaagtatttgacttatgacctgagtagctgggcaggctgataagaacagacaaagcgagctattttgcagactagtaaacttttatcttaggctaaacttttttggtttgagtgagggcaactaaggcggtaggtaagggggaggaaggagaaggctgacaaacaggcattggctattcaagcaggggcctagtatatcctggggtttttgtagtttgctgacctaagcctattcaaggcactttgccttggaaacggatcactgtgtacatgatttccttcaatgggatgtcaggcacggtctgggaaaaggaagctcagccaggctcagggtacagcctctcagggcccctaagggcaaacaggcctagagagagacagccacttgcctgaggacacacagcaagcctgggcttctggttcccacctcttttctcctttgcattcagagcttccctgccatggcttcaagcggtacaggaaagagagaggggaggcccggctgcccgtggccctaaccccatctttgggcttctgaccaaattcgtcagcttctccttcagaatagagggagggaggaagaaagggcaaggtcaacagtggagaactgataaagggaggaggaggaaaggtgggtatcgaaggaagggggagcattggagcaaaacagtaaacttaccagtcagagggcattagatcagacactcctacagtccagaaggtttccccctatcaggaagtccatagccccttcaaatgacaggcaaatgtgaatggcatggtgtctggttgtcattccattcttagcaggctccctgaccccacaagggttaggggcccaaagcaggtccagcctgtgcattggtcctggctccccaccctgacaggtggtgggctgtgaccggtggggaggacaggctggggcagcggggccccagctgtgctgaccgtcccactgtgaccagccctcgcacctgtactcctcgaccactgtgctcaagtaccagaaggggaactgctttgacttcagtacgctgctctgctccatgcttatcggctctggctatgatgcttactgcgtcaacggctacggctcgctggacctgtgccacatggacctgacgcgggaggtgtgcccactcactgtgaagcccaaggaggtatggtcgggcttgagctgcccgggtttcccaaaggatgaacattcccggtgctgtcgtgccatccttagagacgtccatcactgccgcctcatccccagccctggccacgcggacacagatccctcaccaccagcccttccgctgccctggagttcatatttcaaaccaccagtgatttatgtcctcggtgtcttaacacatccagcccagttttccaagctggctgttcttctctgtctgttgtaactcagttttcagctactatgctccctgcttggtaaattttatgaatgccacatagcttatatcttaagtcaaacgattccaaatttaccctatgcatttgataaaaatccagccagccatttttatataagaaaataggccaggtgcggtggctcatgcctgtaatcccagcactttgggagtccaaggcgagcaaatcacttgaggtcaggagttcgagaccagcctggccaacatggcgaaaccctgtctctatcaaaaatacaaaaaaattagccacgcatggtggcatgtgcctgtagtcccagttactcaggaggctgagacaggagaatcacttgaaacccgggaggcaaaggctgcagtgaactgagattgcgccattgcactccagcctgggtgacagagcaagactccatctcaaaaaataaataaaagaaataaaaaataacagacaagtgaacagacatttggttctcagtcccacactcccgaggtaaaaagcctgctttttttttgagacagggtctcttccactctgtcactcaagctggagtgcagtggcatgatctcggcccactgcaacctcaacctcctggactcaagccgtcctcctgcctcagcctcccaagtagctgagactacaggcgagtaccaccacggccagctaattttgtttgttttttataggttctcactatgttgtccaggctggtcgtgaactcctggactcaagcaatcctcccgcctcagccttccaaagtgctgggattataggcctgagccaccgtgcctggccctcaaggcccctttttaatagcaaaaaaaaaaaaaaaaaaaaaaaaaatcaccaactgttcagtggctggtggctgtgtttttagatctgctcattaagatctccataaggaccacaggctgctacagacacaagaaatactctggaatgaatatcagaatcacaaatgcatctctttacatttagaaaatagtcatgctacagacagaaaatgctcttcatgaggtggattaattccaggactctgggatcagggtcaggctcctgtgggtgtccgcagcttggagatggggatccagggacctgaggcatccagcaggatcactgtgtacctgggttatacctgggtgagcacccagggaccccagggtgggtgctctggtgggagaagggcgagacagaaggggaagcacaagaagagccttgctctctcaggcccacctccccaagagaagatggagcacgagctccgccatggcttttggcttcaaaagcctctggctgggcacggtggctcattttgggaggctgtaatctcagcattttgggaggctgaggcaagtggaccacttgagcgcaggagttccagaccagcctggccaacatggcaaaaccccgtctctactaaaaatataaaaattagctgggtgtggtggtgcatgcctgtaaacccagctactcgggaggctgagccaggagaatcgcttgaacctgcaaggtggaggttgcagtgagctgagatcgcaccattgcactccagcctgggcaacagagggatactctggctccaaaaaaaaaaaaaaaaaaaaaagcctctgagctcccacccgggcatctcagctctcagctcagccaaaagcttaatgattaacattatatcaataacaaacagatgcagagaactttcgggtttaaaatccgctttcatgtccattgtgcttgttgctccccacgatggcccagtgtggtagatattgtcacttttatgttacagatgagtatgttgatgaaatcaaaaggtaacataatgtggccaaagtcacacagcaggaaaatggagactcagggaacttgaaacgctggagattcactatttctccttcatgactatcacaggcccacctctgcagcctctgcagtgctctttcctgggannnnnnnnnnnnnnnnnnnnnnnnnnnnnnnnnnnnnnnnnnnnnnnnnnnnnnnnnnnnnnnnnnnnnnnnnnnnnnnnnnnnnnnnnnnnnnnnnnnnnnnnnnnnnnnnnnnnnnnnnnnnnnnnnnnnnnnnnnnnnnnnnnnnnnnnnnnnnnnnnnnnnnnnnnnnnnnnnnnnnnnnnnnnnnnnnnnnnnnnnnnnnnnnnnnnnnnnnnnnnnnnnnnnnnnnnnnnnnnnnnnnnnnnnnnnnnnnnnnnnnnnnnnnnnnnnnnnnnnnnnnnnnnnnnnnnnnnnnnnnnnnnnnnnnnnnnnnnnnnnnnnnnnnnnnnnnnnnnnnnnnnnnnnnnnnnnnnnnnnnnnnnnnnnnnnnnnnnnnnnnnnnnnnnnnnnnnnnnnnnnnnnnnnnnnnnnnnnnnnnnnnnnnnnnnnnnnnnnnnnnnnnnnnnnnnnnnnnnnnnnnnnnnnnnnnnnnnnnnnnnnnnnnnnnnnnnnnnnnnnnnnnnnnnnnnnnnnnnnnnnnnnnnnnnnnnnnnnnnnnnnnnnnnnnnnnnnnnnnnnnnnnnnnnnnnnnnnnnnnnnnnnnnnnnnnnnnnnnnnnnnnnnnnnnnnnnnnnnnnnnnnnnnnnnnnnnnnnnnnnnnnnnnnnnnnnnnnnnnnnnnnnnnnnnnnnnnnnnnnnnnnnnnnnnnnnnnnnnnnnnnnnnnnnnnnnnnnnnnnnnnnnnnnnnnnnnnnnnnnnnnnnnnnnnnnnnnnnnnnnnnnnnnnnnnnnnnnnnnnnnnnnnnnnnnnnnnnnnnnnnnnnnnnnnnnnnnnnnnnnnnnnnnnnnnnnnnnnnnnnnnnnnnnnnnnnnnnnnnnnnnnnnnnnnnnnnnnnnnnnnnnnnnnnnnnnnnnnnnnnnnnnnnnnnnnnnnnnnnnnnnnnnnnnnnnnnnnnnnnnnnnnnnnnnnnnnnnnnnnnnnnnnnnnnnnnnnnnnnnnnnnnnnnnnnnnnnnnnnnnnnnnnnnnnnnnnnnnnnnnnnnnnnnnnnnnnnnnnnnnnnnnnnnnnnnnnnnnnnnnnnnnnnnnnnnnnnnnnnnnnnnnnnnnnnnnnnnnnnnnnnnnnnnnnnnnnnnnnnnnnnnnnnnnnnnnnnnnnnnnnnnnnnnnnnnnnnnnnnnnnnnnnnnnnnnnnnnnnnnnnnnnnnnnnnnnnnnnnnnnnnnnnnnnnnnnnnnnnnnnnnnnnnnnnnnnnnnnnnnnnnnnnnnnnnnnnnnnnnnnnnnnnnnnnnnnnnnnnnnnnnnnnnnnnnnnnnnnnnnnnnnnnnnnnnnnnnnnnnnnnnnnnnnnnnnnnnnnnnnnnnnnnnnnnnnnnnnnnnnnnnnnnnnnnnnnnnnnnnnnnnnnnnnnnnnnnnnnnnnnnnnnnnnnnnnnnnnnnnnnnnnnnnnnnnnnnnnnnnnnnnnnnnnnnnnnnnnnnnnnnnnnnnnnnnnnnnnnnnnnnnnnnnnnnnnnnnnnnnnnnnnnnnnnnnnnnnnnnnnnnnnnnnnnnnnnnnnnnnnnnnnnnnnnnnnnnnnnnnnnnnnnnnnnnnnnnnnnnnnnnnnnnnnnnnnnnnnnnnnnnnnnnnnnnnnnnnnnnnnnnnnnnnnnnnnnnnnnnnnnnnnnnnnnnnnnnnnnnnnnnnnnnnnnnnnnnnnnnnnnnnnnnnnnnnnnnnnnnnnnnnnnnnnnnnnnnnnnnnnnnnnnnnnnnnnnnnnnnnnnnnnnnnnnnnnnnnnnnnnnnnnnnnnnnnnnnnnnnnnnnnnnnnnnnnnnnnnnnnnnnnnnnnnnnnnnnnnnnnnnnnnnnnnnnnnnnnnnnnnnnnnnnnnnnnnnnnnnnnnnnnnnnnnnnnnnnnnnnnnnnnnnnnnnnnnnnnnnnnnnnnnnnnnnnnnnnnnnnnnnnnnnnnnnnnnnnnnnnnnnnnnnnnnnnnnnnnnnnnnnnnnnnnnnnnnnnnnnnnnnnnnnnnnnnnnnnnnnnnnnnnnnnnnnnnnnnnnnnnnnnnnnnnnnnnnnnnnnnnnnnnnnnnnnnnnnnnnnnnnnnnnnnnnnnnnnnnnnnnnnnnnnnnnnnnnnnnnnnnnnnnnnnnnnnnnnnnnnnnnnnnnnnnnnnnnnnnnnnnnnnnnnnnnnnnnnnnnnnnggatggggagaagttggatgtgggagaatggtgggaggagggggataggggatgtagaggggggttagcggtatttgggtgagttggggtagctagatagtgatggttggtgggagtgagggtatggggaggtagggggggagaggagtgcgtgagaggtgatagtggaggatatgggggaggagagatggagggtgggagaggtgaagggatgtggggtgagaagggaagcgtggatggggatgtgcgggggaatgaagtgggggttgagggaggtggagtaggtgggggagtagggtgtggttggaaaggtgagtaatcggagtagtgggaatggggtagtgtagtggagtggatgtgggaatggtggggaggggaggaagaaggaagtggtggggagggatagggtagtatgtgggtgggaaatgtaagaaatggggaggggggagagaatgtgtgggtgagggaggaaaaaataggtgtgggtgttggaagtgggtgtggaggtgagaggagtgggagaagggagattagtagttggaggaagggggggtgaaagagggggggtagtggtggcgggggggtggagaagaatcatgtgtggggcagtcgtgcggatgcagccatcctcccatccacccatcctcccatccatccatcctcccctctctcctcccatgcatcctcctatccatttttcctgccatcagtcctctcatccatcctgccagccatcctcctacccatctcccatctcttcttccaactccacactcctatccttcctccaatcctctttccccactcccttctttcctttccttccatagagtattccttgagcttcttttctggtccagacctatttatacataacaatgaacaacaagacagtcacagttctctcagagggaggcagataagaaaggtacttggtctcccatttcctttctgtggatgaaacctcacccaaagtcataacatataaagccggtaacccccagatgcccagtgccccaaagagtccgatttgtaaaccacagatctagtcagactctcccattgttttgattttacaaatgggctcagtggttgggtgatgggaggggagatgggccgtcacactccggttgatggtgcagtctacatcagaactcagctctcctgctggttccccagccccagggagatgtctgggcccctgacactcctcttccagccatctgactcgtagtcacccacctttccttggcaggaagcggagaaggcaaagccggatgccctgcacggcctgcgggtgcactcctgggtccttgtgctatcggggaagcgcgaggtgcctgagaacttcttcatcgacccattcacaggacatagctacagcacccaggatgagcacttcctgggcatcgaaagcctgtggaaccacaagaactactggatcaacatgcaggattgctggaactgctgcaaggtgcctagggagggggagctgggtgggtgtggcaggcacagtgcaggtgataggaatagagggaagcaatggcagccagaccttggggagagcgagacaccaggccacgagggctttgaaccttctccatagctgcgtctccatggcccactcccttgcccatgaataaccattctgatacgattattgtctctcctgatttgtgtatccttctaaagtgtggattgtttgaatgcattttttaaaaactctatattgaagtgtaacctacatgcagaaaagtacactcatcccatgcatacatacagttcagtgaaatcccacaaatttaacacaccttggtttcctacacccagaccaagaaatagaatattgcccaaaccccacaaagtccctttgcacaattactatcttcctccaaatgtatttttaactcacgtatgtggcactggtacacacacgcgcctacaagagggtacagaggaggtcacaatcctaagtgtacataccattgaattatcacacactgaacacacctgtgtagccaggaccattagaagccccctcatgtctcctcctggccaccaaccctaccatcgtccccagagttaagcactatcttgacttctaacgacatccattagtttcatctgtttttggagtttacatcagttgaatcacacagtgattcaatactcttactcttggattccttcactcattatgtttatgaaattcattgtggttttttgtgtggtttgttcattttcattttttattactttccattatttgaatacaccagaacttatttgtcctttctacagttgcacattgagactgtgtccagtttgggactattttgaataatgccgccatgaatatttgtatacatatatttcagtgaacacatacacacatttctgttgggtaactactgaggggtggaatcgctgagtcacagggtgggcacatactcagttttagtagatactgcccgatttctcaagtgattgcatccatttacactcccaccagcaatgtatgagggttctcagagctccatccacatccttgccaatactggatactttcttttccattttagctattgtagtggacatgtaatggtattgcactgtggttttatttaatgcaattgatttttggctgagtgtgggggctcacacctgtaatcccagcactttgggaggctgaggagggtggatcatttgaagtcaggaattcaagaccagcctggccaacatggtgaaaccccgtctctactaaaaatacaaaaaatagccaagtgtggtggtgggcacctgtaatcccagctacttgggaggctgaggcagaagaattgcttgaatctgggaggcggaggttgtagtgagcctatattgcgtcactgcactccagcctgggcgacaaagcaagactctgtctcaaaaaaaaaaaaaaaaagcaattgctttttgcaaactgttcacatatccagtaagttttaaacctgcttattcattttaaaaattaatctgtaaagactttggggttttctgcatatacaatcagttctatagctgaatgatggccgttttgtttcttcatttttaatccttatactttttcatttctttttcttgttttatttctctggttagtacatccagtataatgtcaaattgaagtggggattctgaacatccttgtctcagtcctgattcacaagtaacgccttagtatcataacatttcactatttgtgtgatgtttatcttgactgtagggtttttatagctagctaccctttatttaactaagggatttctttctcagttcactagcaggtttttttttaatcaaacaaaatttgtttatatcaaatgtttttttcatctattaaatgatcataattttttcttctattaagtggtaaattagactgattgtgttcccccctttttaaaattgaggtgtaattgacataacataaatccactaaagtgcacaagttagtggcttttagtatatttacaagattgtgcaactatcaccactatctaattccagaattttttcatcaccccaaaagaagatttttatttttgagacagggtcttcctttgttgaccaggctggagtgcagtgatgcaatcacggctcactgcaacctctggactcaagcaattcttccacctcagcctcccgagtagctgggactacagactgcaggcatgtgccactatgcccagctaatttttgtattttttatagagacaaaaaatgggttttgcaatgttgcccaggttggtctcaagcaagccacccaccttggcctccaaaagtgctgggattacaggcttgaaccactgtcccgggccccaaaaagaagattgtggttgagattatactggatccatagatcaattgagagagaaccgttttcttaacaatattgaatttttcacccatgaaccatggtatctctcttcagttatttaagtcttttaaaatttctatcagcaacattttgtaggtttcagtgtacagttcttgcacatcttttgtcagatttattcctaaatatttcgctttttgatgctatgatttttttaaatttcaccttctgactattctttgttagtgaatagaaatgcagttgatttttacatattgatcttctatcctgaaatcttcccaaattcacttatttgccctaatagcctttgcgtggattccatcaatgtttatacagataattatgttatctgtgaataaaaacagttttacttcttttcccatctggatgcttttcttcccttatcacactggctggaatcatcagtaaatgttaaacagaagtgatgaaagcaaacctgtttattcctgatcttacggagagcatttagtctgataccattaagtatagtattagccacaggtttctcttattggttcccattatcaaataaaggaagtttttctccagtcctagtttgctgagagttttttcagaaatagatgctagatttttgtcaaatactttttctgagtctattgagattattatgatttttcttttttagtttatctacatggtaagttacttggattgattttgaatgttagactaaccatggttttcctgggataaacctcatttcattgtgatggttaaatcttttatatattattggtgttgaactgaaaattttgcttagaatttctgtatctttgttgaagagagatattgttctgtagttttcttagaatatatttgccaggttttggtatcacagtaatgctggcctcatggaatgagttgggaagtttcccttttcttcagttttctggatgagtttctgtagaattggcatgatttcctttgtacgtttgctggacttcacaagtgaagccatctggggctggaattttctttgtggaaggattttaaggtacaaattcaataggaagactcaagctgtttttgagtgaggtttggtgtttgtatctttcaagaaatttgtccatttcatttgttttcaaatttattgttatgaaagtgttcaaaatagctccttattttccttctaatatgttaaagtctttagtgacattaccccattcattcttaatattggtagtttgtgtgttctctcttttgctcctgatcaatctggttagaggtttatcaattttgttgctcttgatgcaggggcaggccccaaaatcagggctttgccagtgaggattcgtggctttttccaggaaagaattcaagggcaagctggtggtgttagaggcaactttacttgaagtggcagcgtacggcagcagcagatggactgctccttgtggagcagggctaccccataggcagtgtgcccagattgtaaccacccaaggggttcaccttgccagctgcctagacagagctgattcaagactggggaattgcaatagagaaagagtaattcacgcagagcaggctgtgtaggagaccagagttttgttattactcaaatcagtctcccagagcattcgtgcattcagggagcagagtttttagggacaacttggtgggttgggggacgccagggaaccaggagtgctgattggtcagagatgaaatcacagaaagtcaaagctgtcttcttgcaccaagtcggttcctgggtggggctcacaagatcagatgagccagtttatccatctggtggtgccatctgatccatcaagtgtagggcctgcaaaatatctcaagcactgatcttaggagcagtttagggagggtcagaatcttgtagcctccagctgcatgactcctaaaccataatttctaatcttgtagctaatctagtccctaagcaagaaggaggtctgctttgggaaagggctgttattgcctttgttttaaactataataaactaagtttctcccaaagttagttcagccttcacctaggaatgaacaaggacagcttggaggttagaagcaagatggagtcgattgagatctctttcagtgtcttagtcataattgtgcaaaggcggtttcaagagtagcggctcagaggcagttccacagtcacatttatatccactttaatcatatgcaaattaaggggcagattatgcagaaatttctagaaatagagtggtaacctctggttcactttgtcattgccatggaaaggtgtaatttctgggtgttgccttggccccgttttagctagtcctcaatttggtccagtgtctgagcccccagcttggaagtcaagtcccaccttctggtcagtaagtcccaccttattgtcaataaaccagtttttggttttgtggtttttctccgttgtttttgttttctatctcattgatgtccactctgatctttattattttatactttatgcttactttgagcttcatttacttttttctagtttcttaaggtggaagctgagatgattcatctaagactgttttttgttttgttttttttttgagacagagtttcgctcttgttgcccaggctggagtgcaatggcgcgatcttcactcactgcaatctccacctcctgggttcaagcgattctcctggctcagcctcctgagtagctgagattacaggcatgcaccacgcccagctaagcctgttcttttctaacataagccttctttctctcggaagtactactttagtgacatcccacacattttactctatcatgtattcattttctttccattcaatatgctctccaatttcccttttaatttctcctttaattcatgggccatttgaaaatgtgtttagtttacagatatttagaaactctctagagatatttctattgttgatttctaatttaattctgtagtgattagagaatataacttggtatgacttctattattttacacttgctatagtttgttttatggaccataatatggtctgtctaggaaattcaccaaattcttaatatagtgaattttctgtgtgtacttgacaagaatgtgtattttgctgttgggtggaatgttctataaatgtcaataatctcaagttgattggtagtgttattcaaatcttatatatctttgctgattttctgcctacatttctttcaattattgacaacattattgaaatgttgggctacaattttggatttctctatttcttctttcagttctatcagtatttgcttcatgtattttgaagccctgctattagatgagtaaatgtttgagattgttatgtcctcatgatgaattaacctctctatcggtatgaaataatcagctttatccctagtaatatttttcattctgatgtctattttgtctgatattaatatagccactggagctttgatttgtattagcattggttatcctctttgcagaactgtgagtccattaaacctctttttctttgcaaattacccagtctcgggtatgtctatcagtgctctttcgttgtctcgaaggcactctgtttctgaccaggccagtttcccttgggccctttttaaggtgaccctgaggaacggctcgctcatttgtttggtggcttggactgtctgtccatctgcatggcggacgtagccagtctgctgctcctgaactcccgtctcaccatcctgtcccagctgccctcatggtgtatgagcctcttcctgcaacaacaggtcagaatactttggggcagcaagtaggtcagctacctggtccctttagttacactcagtacattgccagcattgatgggaggtgcaggttgttcacaggcttaacaccaaaactgcctgggagtccatggtcaagttttgcagtagtcaggacctggaaatgtacagaaagctgtctcatcttcctttgaccgagttatcatggagataactcaagtgataatcactcgttctgttgctaccgccatcacacatcccttctgcatgattactgagatttgtggtacaattcactgacagagagtccaagtactgtgaactttgtgactccatagtaaccatctattgagaagaaggcatcctaggatttctcatgtgtcttattcctcacctcctaggcaacatcatttctttatggctctgtaactcactggcctacctcatcaatacctatgcactctggtggggcatggcggcttacgcctgtaatcctgatactttgggaggatgaggtgagaggatcgcttgagctcaggagtttgagacaagcctgggcaacaaagtgagacctcgtctctataaaaaaaaattcaaaaaaattagccaggcatgatggcatgcacctgtagtcccagctactagggaggctgaggtgggacgattgcttgagcccgggaggtcaagggtgcagtaagccatgattgtgccactgcactccagcctgggcaacagagagagagagtctctctctctctgtcacacacacacacacatacatatgcactggacagtgaggtttctatcgggaatgaaatgaagagtatgaagagttattctcaagatgtcacagcactgtttgccagtatgttgacctatccctttgtgcttgtctctaatcttatggctgtcaacagccatgggcttgctggtggacccccttcttccttcccagtatatactacttgcatacattgctggtgcatgctacaaaaagagggaaatatgagccgaggaaatagcttgtttttcccaaagcatccctttgggaagacttgttgtgacctgagaatgctaatttgaagatgtagggcaggacagtgacatttctatagtcccagatgcaccaaattatgggagacaatgttgatttctatatagttttccacacttttattttattttatttttgagacagactcttgctctgtcacccaggctggagtgcagtggcgcgatcttggcacactgcaatccccgcctcccgggttcaagtgatcttctcacctcagcctcctgagtagctgggattacaggcatgcactaccacaagtggctaatttttttgtatttttagtagagacagggtttcaccattttggccaggctggtcttgaactcctgacctcaagtgatctgcccaccttggcctcccaaagtgttgggattacaggcatgagccactgtacctgatgacctgcttttttaatggtcatttagtcttggggaatgaataaataagtaaataagtgtcagaggggcgactgccagcccctgcgggagacaggcagacttgatgcatgattgctttgccggttgctctgtctttgtgaagaagtcagaagctctgagatgagaaacttctgccttcagcaaaggagatgcctctcatcactctgcctcccttaggcactgattccagggttgtgggaagtaacactcagtagatgcttagaatagtctctagctgttcaataaatgttaactattgttgctcccatcttacaggtaaggaaactgaggccaagtaaagtgagatcatttctcccacgccacacagagggggcagagccgacactgccctcccccagggcctgggctcataagcaccatggtggtcggtgtcctctgaaggataacagcccttcagaggatgctacagtccttcagcccctcttccagcctgaatgtcctcatctcatccatcaggctccgaggtgaaggtggaagtgaggccagaggggcagtgctgtgccaagtgagggcatgaggaagagatgatggcataggctgtcacttttaccagcacacgaacattggagcagctgctttgtttcttcaaagaaccttgaaatagcgaggggttggaggaggatggcaaggcatccacagagtgactgcctggcgcaaacgtaccctgggcacatggatgtggctgttgtccattcaattatgctttttctaaagaaatagaacttaagttaaagtaacaaagcataatatctaactactgcttacactggtttacaaaagtaacaaaatttaggccaagagtgcgaataggttggccgggcacagtggctcacgcctttaatcccaggactttgagaggccgaggtaggtggatcacttgaggccaggagttcaagaccagcctggccaacatggtgaaaccctatctctactaaaaatacacaaattagctgggtgtggtggcgggcacctgtaatcccagctactcaggaggctgaggcatgagaatcgcttgaacccaggaggcagaggttgcagtgagccgagatcatgccactgcactccagcctgggcaacagagcaagactccatctgaaaaaaaaaaaaaaagagtgaaaaaaggcaaatatctatacaattgggttcctatccactaagcccattaagctttgccacagtcgctgtgacatctaccagcagttctctccccaactctcctctgctgtgccccccacttctctcccctccacccacgagctagggcagagaaatactcaggagccctcccaggacccacacatgacagtgagtactaggcttagagttggcttcaggacagcttaatattaacacccctccaggcagctgttctgcagcctctgatttcctctggaacatgatttagggtggggagaacaccttgctctaggaaggttgattagaatgtgaggtgctccccaccttctaggaattatctgacagatgagccacttttattgaggggactgaggactcaggtgggctgggtgaaaagaggtcaggagtttgagaccagcctgaccaacatggtgaaaccctgtctctactaaaaatgcaaaaattagctgggctgtggtggcgagcacttgtagtcccagctactcaggagactgaggtaggagaatcacttgaaccggggagatagaggttgcagtgagccgagatcataccactgcactccagcctgggcaacagagggagaccctgtctcaaaaaaaaaaagaaaagaaaaataaaagaaggtggcagacacactccatggaggagaaattcccacccacctgctgttttttttttttttttggagagacagggtcttactctgtctcccaggctggagtacagtggtgtgttcacagctcgctgcagcctcaacttcctggaatcaagtgatcctcctgcctcagcctcccaagtagtcagaactacaggtgcataacaccatgcactggcttaaaaaaaaaaaaaaaggccaggcacggtgcctcatgcctgtaatcccagtactttgggaggccaaggcaggcgtatcacttgaggtcaggagttcgaaaccagcctggccaaaatggtgaaaccccatctctactaaaaatataaaaatgagccaggcatggtggcatgtgcctgtaatcccagctactcaggaggctgaggcaggaaaatcgcttgaacctgggaggcagaggttgcagtgagccgagatcacgccactgcactccagcctgggcgacagagtgagactctgtctcaaaaaaaaaaaagaaaagaaattgtggagatgggatctccctttgctacccaggctggtcttgaactcctgggctcaagtgatccttctgtgttggcctcccaaagtgctggaactacaggcatgagccaccatgcccggctctccacctgcatcttatgtataacttccacgtgtgcctgcctatttcccttgttcctggcatgggtaaaataaacaggaggaagcctttttaaaaaaccttccacttcctgggagttgctagacccttctgccatcaaatcttgctggtttgttttcattggctctaagcactgcccagccgatgcggaaagacctgcacatccaggtctagcccaggccagagagcctccttgtctttcacagaggtcaacacgagatttcctcacagggaggctgaatgatgggcagggagttctgctccccctcggggcctcagtttccctgttgggatgaggagtgtgggcatggactctcagagccacctgggactgacgttctgcttccccaagccctgggcccaggtcccttctctgccccggagtagccatctcccaactccccatggatcaggtggggacgtggtggctgtggggtacactcagttgactgccctcatccccaacaggacttgatctttgacctgggtgaccctgtgagatgggagtacatgctcctggggactgataagtctcagctgtccttgactgaagaagacgacagtgggataaacgatgaggatgatgtggaaaatctggtgagtctcagcagctcgagagcccagggaatgtgtgtgaaggcttcagggagcctgacaagtgtccccagcagcatatgtgtggcagtgggggatggcccaagtagaccagtgatgggttcctcaaagcaggaaggcttgagcaattcccttattttacagatgggcacattgaggcccagaaaggccagaaacctacccaggacctcccagtgggttacggaagggacaggacttgacgtcaggtcttctgccccccatatcgtccaccttgttcaggagttgccctgctcctttggaaagcatgtcccttgccagcctgggcaacatagtgggaccctgtctctacaagaaaatttaaaaattagctggctgtggtggcatgcacctgttgtcccagctacttgggaggctgaggcaggaggatcacttgagactgggaggccgaagctgcagtgagccatgttcatgccactgcattccagcctgcgcaaccccaccccaccacaaaaaataaaaataaaaataaatttagaaaaagaaagttgcagagcggggtcataacaccccgctctgcaaccccctgggagtcccagagctggctgttctcagttctatcccaagtagccatcatgagccccacatgctgccaggcctttcttgtctgttctgtcagttcctctgaatgtcgttggccagggccttacccacatcaccagcctcccttctctgaattcagtttcagcctttatgtgaaatggaggcagaaggatcatagttgtattcatagtaattctaataagtgcattcgtctggcatcacaaagcaccacagatgcggttgcttaaatgacagaaattaattttcttacagttctggaggctggaagtctgagatcaaggtgtggacagggttggttccttctgagccccctgtcctcggcttgtagatggctgtcttctccctgtcttcacattgtcttccctctgtacaaatctatgtcctaatctgttcttataaggacaccagtcatttttctttttatttttttttgagacagggtctcctctgttgcccaggctggagtgcagtggcacgatcatagctcactgcagcctcgaactcctgggctcaaatgatccttccactttggcctctggagtagctgggactacagacacacaccaccatacccagctaatttttgtttttcagagagacatggtcttgctatgttacctaggctggtctcgaactcctgggctcaagagatccccttgccttggcctcccaaagtgttggtattacaggcatgagccaccatgcccaaccaacaccagtcatattgggttagggcccactctaatgaactcattttaccttaatcacctctctaaagaccctgtctctaaaaacaatcattcaaacagtaagtgatcaagacaacaacaacaacaaagaaaaaataagaaaaataaataaaacaaatacagtcactttcagggcttaaaacttcaacctatgaattttagggggatgccattcagcccgtagcaaaaggtagcactcacatggtccttactaagcactgggatccattgtatctacttaacctgaagtaactcatttaaatccccacagccacctggtgaggtgggcactggtattaccacctgtgattaatattatcccattttaccgatgggaagactcacacacagagaggttaagtcacttacccaaagcgatacagctggtaagtgacagagctgggatttgaacctacacagtctggctccacagtctgggttctcaatggtaactctgttctacctcctggggctgcttgatgtgatgtgcttggcacagcagtgtagaccgtctcaaaagggtgctaaatgttctcagcatcctcatctccagagactggggacatcttgtgtgcagtaaatccaggcataggtgccccctgctggccttggggcatggaccagccagggcctgagagcccagccctgcaggcagccggctgagcacccacatggctaataatcaaacagttccagtcacagagtcctggtccaccctggcccaagagccctcattacagcaaagacggacagagggcagcccaaagagtcagaacccagtcatggacccccaggaaaaaccagaccccgggtgacagcccacccacctgaccatcttagagatttttgacaatactaactgctgactgctcactcatttttgtcccctgcaaaatgtcacaattagataaacagttgtcagaggtatgagcaatgtttgtggaaaaaaggttttaagtcgagaaagtcttatccaagtttctgtgattatctagtttgaggaccatttatctagatcgggccttatttcacaaatggggaaattaaggctcagagaggaaataataataggccgggcatggtggctcatgcctgtaatcccagcactatgggaggccaaggtgggcatatcatttgaggtcaggagttcaagaccagcctgggcaacacggtgagacaccaccctcctcccccggccgtctctactaaaaatacaaaaatcaactgggtgtggtaggtgcatgcctgtaatcccagctactcaggaggctgaggcaggagaatcacttgaacctgggagacggaggtttcagtgagccaagattcactgcactccagcctgggcaacagaacaagactccatctcaaatgataataataataataatgtcagccaatcagagccccaaggcctttacagacattatatcatttaatcctcctaaaaggtccagtttacagttaagaaaactaaggcttagagcagttaaaggacttgcccaggaccccttagctggtcttggagagagggtggggcttgggtaccctgactccagaaacacctctctaatcacgaagggcctgcagccagggcagggggtgctgctgtcctaagccaggcaagtatagggaagggctccctgcccagagtcgactcctccttttccacatcatgggtcgtgctcatgacctccagttcccctgcggaagccaacggaccaccttggcttggctctgcaggcagagacagagctttgaccataacttctgcttcaacaccctgaccagcaccacctcccccacccccttctctcccatcagggcaaggaggatgaggataagagcttcgacatgccccactcgtgggtggagcagattgagatctccccggaaggtattttctatttgtgtattcacttatcctctccagatccagttcctgggcctccagagaggtctgcaacagcgaggcagggggacacagcagggaatgccatgccccacatttccacccttctcaccttcagctgcaccctccctccctccctccccccttcctgccacacgcactcagctctgaccccgagggcctgacgaccagtctggcacacggggcgatgcagttcagtgagcatgtgtgggatgatggcgtgtaggtgacagcaaggcctggaaacccagcccattcccctctcacactcttctacccagaggaggccatgggcagtgcccagatggtgcggggggtctcaggaccggagaggggcaggtagagaaggcaggagggcagggactgtcatgctccatgtcaatatctgctggtgcccacctagggagcacccagacctatggggagggcatgggccacttcaacagggtgggaagtgccagagaggctgtcatgggaacccagaggggggcgcacccagcccagcactggggctagggcctggggatgggtgagcagaaaggggtaccagaagtaggctaggggtcacctgggtgaagttttgaaggatctgaaggagtcagtccaacaaggggaggaggggatgacggtgtttctggcagagacctgtacaagcaaaggcctggcaatgtgagagtgtggttggctgcagggcagaccctctgatggggctcaaatcccattcttgggtggatctgtgcttctgcctggcctgagaacccctctagggctggagccacccctggtgattattctcctcggcctccctggatcaggcttggggctggaggagttcagtacacagagaacgggcagtggatggatgaatggctgggcggggctggccctcccttcccccaaactagcaagaagagaccacagctgactgtgtccacagcatttgagacccgctgcccgaacgggaagaaggtgattcagtacaagagggcaaagctggagaagtgggccccgtacctcaatagcaatggccttgtgagccgcctcaccacctatgaggacttgcagtgtaagggggattgctctggacatgggtccaggccagcccaggggcgggggcggcttctactctctctggggtcattgctggcctctgtgtgcctggaataaggggggttgaaggctaggggagctggcctggctgcggcaagtgtccatcggccccacaggtaccaatattttggagataaaggagtggtaccagaaccgggaagacatgctggagctgaaacacataaacaagaccacagacctgaagacagactacttcaagcctggccacccccaggctctgcgcggtgcgtggctcccctttcctgggccacccaggagcctggggtagaggcctcacacaccctgtggcaggtggtatgtggtggcaggaaccagcatacatattatacatgggttcttgggcagcaagcagtagaagctgccctgcctccctcagcaaacccgatgtgtgggaggtcagggaaagctcagaaattctaaggaaatataacaaatgctcctccaggaaagctaaagggggcgccacatacccgttctgtggttggaatcaggccggaacctcaccatggggtcacacggtggaggccacatttaaaggaggcagtgccggacacaggggctcacacctgtaatccaagcgctttgggaggccaacatgggcagttgagcccaggggttcaagaccagcctgggctatatggtgaaaccccatctctacaaaaaatataaaaattagccaggcatggtggcatgtgcttgtaatcccagctactcaggagactaaggcaggagaatcacttgaacccaggaggtcgaggctgcagtgagccgagattatgccactgcactccagcctgggtgacagatagagatcctgtctcaagaaaaaaaaaaaaatcctgaccaagaaatttacaaaagaaaagcataggagtaatatacatttttttaaatgatcaacctcatttggaagttgataataaaaaaaaagaaactaataaggtccctaaccaataaaggaccatcttataacccccatgttggcaaagatgaaaaaaatggtcctactgggtatgaacaagtatgggagcaacagtcactctgtgtcactgttgatgggacagcagattggaacttttctggaggacagttgggcaaaatattgataatgaccataaaacgtgtacgcttttggctgggcacagtggcgcacacctataatcacagcactttgggtggatcacctgaggtcaggagtttgagaccagcctggccaacatggtgaaaccccgtttctactaaaaatacaaaaattagccaggtgtggtggcaggtgcctgtagtcccagttacttgggaggctgagacaggagagtcacttgaacccaggtggcggagactgcggtgagctgagatcacaccactgcactccagcctgggtgacagagcgaggctgtgtctcaaaaaaaaaaaaaaaaaaaaagtacacttttggacccagcaattccactgctgagaatttattcttagcaaataatggacaagaacaaaaaatgcacgatgcagatgttcatcatggtgttggtaataatcagaaaaagttgtacgcaacctaaacacccagcaataggggactggttcatagctaacctcatccataatgtgggtctgtcttctccctgggcctggggttgggcgaccaagccagcagccatacttcctagtgcttatgaagctgtctcctcccaactcccgctccccacccagtgcactcgtacaagtccatgcaacctgagatggaccgtgtcattgagttttatgaaacggcccgtgtggatggcctgatgaagcgggaggagacacccaggacaatgacagagtactatcaaggacgcccagacttcctctcctaccgccatgccagcttcggaccccgagtcaagaagctcactctgagcagtgcagagtcaaacccccggcccattgtggtaagagctcgcgggggctggggacaggtcgccctccttctctggcagctgatgtcacctctgaatggtgagagccctggctctggggtggcattaaggcctgagacatatccaagggcaccaatgatgaaccaagcattttaccaaatgtattagtctgttctcatgctgctttgaagaaatacctgagactgggtaatttataaagaaaagaagtttccttgactcacagttctgcatggctggggagcccttaggaaacttaaaatcatggcagaagggtccttttcaccttctgcctagtgaaaagggtcctttccaccttctgcctagtgaaaagggtccttttcactagaatcagggcagcaggagagagaataagtgctgagcaaaggggaagctgcttataaaaccatcagatcgtgggagaactcactcactatcacgagaatagcatgggggaaaccacctccatgattcaattatctccacctggtcccgcccttgacctatggggattacagttcaaggtgagattttggtggggggacacgaaactaaaccatatcaccaaatgcgccatcctggggttgtctggtgtcagactgtgccctcagccatggggccaaggatgtgttacttccttattgttatacaaaaatacacactcatgactaaacatttggaaaatatgtaaaaatgtagagaaaagtaaacatatctcagaatggcatctctcatatgttgccacggattataggtttggttttgagagttttttctaatgtaattgagatcgggacccagggattagagtccctgtattacccacttaacatgaaattgtgcattttccccttcatgtcattacaaattagttggcaactgtgtgtaatggcagcatgccaaagaagctctttctagcagtaagggatgtctagcaatggagtaggctgcctggagaggtggtgagctccccatctcttgaggtaggcaagcagagtcttgaaggagctgaggaggggcccagcaccatatgggagtggagtggcctggccctgagaacccacgaaatccattgtctggctaggaggggctattccacgtgaatcgccaaacgaccccagactccagtgtcctgaacgttcgttgctcctgcctgcgggcatgcacagaaatctcctctcacacgctcatcctttgctcatcctttgcatgttctggcctcccagaaaatcacagagcggttcttccgcaacccagcgaagcccgcggaggaggacgtggcagagcgcgtgtttctggtcgcggaggagcgcatccagctgcgctaccactgccgtgaggaccacatcacggcctccaagcgcgagttcctgcggcgcaccgaggtggacagcaaaggcaacaagatcatcatgacgcccgacatgtgcatcagcttcgaggtgggcctgggggccacggcgggcaggggtcggctgcaggaggaaccggggctctctgtcttattccagccacttgggagaaccaggatgggcgctggtgaatcccggcgaggaaattcatctttgctctttgggaaaaccaaaagttcccatctggggacccttctctttgagctcctctgaaaatcttccttttccaccaaaaaagcgaactcagcaggctaagacgactctgcagtcctggtcagggcaaacctcagatcctagggaggctctgtgggaggggaagagtctcactacctctgaggggctagccttcctagtcaaacgctcactctcccggcacagtccccagcttttctgagtcttcagttcctcttttattattatctgtatttttataagtgagaaaattaaggctcagagaggtttagcaacttgctcgaggtcacacagctggaaagtggcaggggtagatttgaacccaggtggtcctatgccccgatcatggcagcctctctgtgttactaaggtggttgttgtcccaggtggagcccatggagcacaccaagaagctgctctaccagtacgaggccatgatgcacctgaagagggaggagaagctgtccagacatcaggtctgggagtcagagctggaggtagggtcctgtgggagagtgagcaggtgggcggtatctttgtttttgagatagggtctcgctctataacccaggctggaatgcagtggcgcaattatggctctacatcccgggctcaggtggtcctcccacctcatcctcccaggtaactgggaccactagcgcacaccaccatgcctggctaatttcttgtttttgtttttgttttttaacagatggggtttttccattttgcccaggctggtctcaaactcctgaattcatgcaatctgccctccttggcttcccaaagtgctggggttacaggagtggaggaggggtgtctccatcacgccctccaacacttctcatttcaggtgctggagattctgaagcttcgagaggaagaggaggcggcgcacacactgaccatctccatctatgacaccaagcggaatgagaagagcaaggaatatcgggaggccatggtcagtcccaatcccttctccaggccccagcttttcctagacccccctggtctccagggtggtggggaccatgagggattctgctgagaaaccctctgtgggggatacggttattgataccatgcggtcatccttgctgctgaactgaccatttctatggttcatcccaaagagtacttgggatttgggcaaggtttccccccatccccaggggctgtagccaagccaaggcctgtggttgggaaaagaattaaaattatgtgcccacctctactcagggctcccactgaggttgcaccctgggccagtggccccagtgagctacctctggctccaggcctgagctctcctgctctccagcacagggagggcattcaggttacaccttcaggttgcaaggccccgcctggttttcagggccggcttctgaatccctttcaccaaccaagttgagattttagtttgggggtcgtgaggcaggatgggcatcagatgactgttctcagatcccaggggagggtgtcagcccccacgtctccaacttcactgccccctgtctgcagatggaggacacaggccccagggtggaaaagaaaagtgaagggagttactggcagtttttaactaacatcgttaataaccactaccgttgactgaataagcatctactatggattgtcaggcatcaggctgcgtgctttacagacatgatcctgtcagatcctcagatcctcagagaaggaaaccaaagctcaggtagtgagatacaaattcatgtaagaaaaaaagagttggctgtcaccagtaaacacaggtccagagaccagcatgtgggcccttctaaggcccatcttggaggcgccatgcactggaacctggctgtgaggtctggctttgtgctggcacactgctgatgcagagctggtggagaggtctctgtagttcctgctgatccagctatctgcccctcacctttacaggagcgcatgatgcacgaagagcacctgcggcaggtggagacccagctggactacctggccccattcctggcccagctcccgccaggagagaaactaacatgctggcaggcggtgcgcctcaaggatgagtgcctcagcgacttcaagcagcggctcatcaacaaggccaacctcatccaggcccgctttgagaaggtgccaccagggcctttgttggggagggggggatctcagcatctgcatccaggaaatgggcccacggctgtccgcccactacctcacaggcttgtgagggcctgatgacgggatgaatatgtcaatgcttggggtttccaaatgactgagttgttcctcctcacacttgtttatcggatagatgaatcgatagggagatggatggatgtaggtatggataggtgggtgggtgggtgggtggatggatggatggatagatgggtggatgaatgcatgggtagatggatgaatagatagatgggtgggtggattgatgggtagatagagggatgggtgggtgcatgaacagatgggtgggtggatgggtggataaatggatggatagatggatgggaggatgaatggatgggtgagtagatagataggtgtatgggtataggtatcgtatcggcggaatgcagatgctggcgcctattattcataacatcttaaatcacccccactacactataaataaccacatatataatacaaaactccaaaattcaaaaaaccttaaaatatctacaaatataataaatctgcaaaatatcgtaaaaaccccaatatactaaaattcctaaataatctcaaatttttacaaaacttgaaaaactcaacaaatactacaaataccacaaaaatataaaattcgtaaatcatcgtaatatatcaaaccaacccaaaaaatacaaactccattatatatataaccattaaaatccttcaattctacaacccttacaatcttaaaaatactaaacatctcacataacaaatacttttaaaaatacatacaatctgaaaacaatagaaaaacacatataactcaaaacacttactaatatttaagaaactgtaaatacatcagatcaacaatcaccactaacaattacaacataaataattaactctacaataccaaaccacatataatgaacacttactcacatgtgacctaaagttactttaatctaactacccaaacatctgttaaacaactcggcaataatacaatataaattactctgaataaccactctaattacaagatcaaaataaactaaacatacagaccttactacctcacaaacacattcacaacattactcaacacaaactctaaaacatttcccataatacacaccattaataatacgattcaatataccatcttaataatcactaaccataaacctccttatatacatcaccacatataaattcaccgataacaaatagacaacatataatgttaaatataactgctacatacaaacattatctataaaagacttgtcaatacataatatgaaataacaaataccgccctgatatataacaccgataaatccatccacctcggattctacacaacagacaatatcatacgtatctatacagacatctctcacagataaatcatacatatctaataactaactctgcacacatatatctctcgtcctaatagcatgtctctcaatcgaatatattattcatatcaacaacaaccctcactaagatcatgtacatcttatatacaatacactattcgagatatatttctctacctacatatatacaatatgccaacaatactgcgcacatataatcaacacactcccgtaatacagtcactagaataagtatcaacacctattgggctatacatcgtcgtctgctacaaataatatctgcatcgtataacaaatataatacacgcaatgatatatataacgcgttgcatacatgatatcgatgctacactgaaataccatcactatctacattgcaccatactacttcacacgacgtaacnnnnnnnnnnnnnnnnnnnnttgttgggtggatgtctgggtctggtgtatggtatgctggatcagtggatgattgtattgagtgtgtgctgtgtgcggtgtgtaatacgtggcggatgcgttgggtggttatatggcatgaggaaattgtgggcgttagtattgtgtatggattgtggtttgattggtggttggttggctgattgtttgagtggatgggtgaattgggcatggttggttgtgtgttgagtgagtgggtgggtgtcggggtgggtggttgtttgagtgtggggctgggttcgagtgttgatagatggtggaatggatggttggagggtgggatgctggtgtgtgtgggtgatggattggttggtgggctgtatgcgtgggtgaagtgttgtggggttgagttgctgtatggctgttggtctggatgcgtgatggagtgggtggatgtatgggtgggtgggtggatgggtggatggttgcgtggatggatgggtgggtgggtgagtgggtgggtggttgggtggttgggtgggtggggtggttgtgtgggtggttgtgtggatgggtgggggggtggttgggtggctgggtggttggatgatggatggatgggtgactgggtgggtggatgggtgagtgagcaggtgggtggatggatgagtgggtgggtgggtgggtgggtggatggatggatgagtgggtgggtgggtggatgggtgagtgggtgggtggatggatgaatggatggatgggtggatggatggatggatgaatggatgggtggatgagtgagtgagtaggtgggtggatggatgagtgggtgggtggatgggtgggtgggtggatggatggatggatggatgggcgagtggatagatggacggttggatgggcgagtggatagatggacggttggatggatgagtggaaggacggatggacggatggatggcagggatgggtggagggatgggcagaggaatagatgggcagatggctgggtagacagagagatggtacactgtaacaactcctagtccttgacccatttttgttggtcaggcacacaccatgtagttcccgtgcactactaagattatgtcacttaatcttcacaaggagctctacaaggggaggggggagtacaatgaccctccttttgtagacaagaaattgcaggttctgaaaatgccagtaacttgtccagagctacatggctctctcagtcttgccccgttctgatctcatggacatgacatccctataaacatgaccccactggctcccacccaagatattttgtggcccctgcctctgtggcaggtatggataggtggcttgtgtgagtggggacactggggccaaccgtcatggtgctgtctagtgacccatgggattgcagcctgcagcctgggtgaaggtcagccttgtcagtcctccttctctgtctgccctatgaccacaggagacccaggagctgcaaaagaagcagcagtggtaccaggagaaccaggtgacgctgacacccgaggatgaagacctgtacctgagttactgctctcaggccatgttccgcatccgcatcctggagcagcgcctcaatcggtgagcaggcagggcaggtggagagaacccactgggaggctggaccaccagctttgtaacccctcaccctctttccttgcctctctgacttcagacacaaggaactggccccactgaagtacctggctctggaggaaaagctctacaaggacccacgcctgggggagctccagaaaatattcgcttgatgtccctcctggggcctcagccagagctgccagagaaaggaaacctcttcccgcagcctggctcctgtgttccctctatccagccaatgcctgtttacacagacacctggcctcactgccagcccacctcccctacagccctgtttgttcctgcttctcatgattttcctgtaaataaacacactcttaatttgccatttgtgccttgcgcttcacaagctccagcagcagcctttctcttcttctgttatctatagcctgggaccacccccttcctccccttggcctgtcgtttgcttcctgtccttctctccgttggaatgtcaggtcttcacagcacctctgcagatggtcccacagccatctgcaaacaactggttatatctcaatgtgactagggtggcccacctcaccaagtgggatggggaaggctaagatgcatgccccagaatttgaggactgaatcccagctcctcctcttaccagataccacttacccatctgtggaatggggtagcattgttgcattaaataagacttatggccaggtgtggtggctcacacctgtaatcccaacatttagggaggctgaggcaggaggatcacttgatcccaggagtttgagaccagcctgggcaacataataagaccccatctctaaaaaaaaaaaaaaacaaagagccaggcatggtggcatgagcctgtagtcccagctactcaggaggctgaggtaggaggatcactttcacctaggaagtcaaggctgcagtgagccatgattgcaccactgcacttcagcctaagcaacagagcaaaaccctgtctcaaaaaaaagaaaaaaaagacataaattataaagcagggaggctgggaatggcacatagaaagcagtcattaaatgttagcttacaaaatagccaaaaaacacatgaaatggttgtcaaattcatgagtcatctggcaaatgaaatgtcacaacaccctccggtatgaaaaaaataaaaagtactggtgacgatgagaaacaactggaactcccaaatagccttcctagtgaaagtataaatcagtacaaccattttggaaaactgcttggcattatctattaaagctaaactaaagcccaacaattctactcttaggttctactccaatccatcattcatcaagtaagaatgatgaacaactcaaccgaaatgtagatagatagttatctgctaaaaggcatgtgctagaactttcatagcagcattattgataatagcaccatacttggaagttacccaaatgcccatcaagagcagaatggatacataaattgtggtcttcagatattttgggttgtctttaactgcttagggagaactgcttagggagaatgctactggcatctagtgcatacaggccagggatgctgctaaacattctacaatgcccagaacagccccccacagcaaataattatctaggtctaaatgccaataatgttgaggttatagagtatattagtctgttttcacactgctgattaagacatactcaagactgggtaatttgtaaagaaaaagaggtttaatggactcacagttccacacggctggggaggccccacaatcatggcagaaggccaaaggcacatcttacatggtggcagacaagaaagaatgagaaccaagcaaaaaggaaaatcccttataaaatcatcagctctcgtgagactaattcactaccatgagaacagtatgtgggaaacccctcccatgattcagttatctcccactgggtccctcccacaatatgtgggaattatgggagctacaattcacaagatgagatttgggtggggatacagccaaaccatatcatagagcaatgaaaatgaatgaactgcaacacaactatatggaatgatatggtcaaactgcctaagtataatgtcaaaagattcaagacacaaaagtacatactctattattccatttatggaaagaacaaaaataaggaaaattaattggtgatattagaagtcaggacaaccgtcactcttggagtgtgagggttagtgaatggatgtgagcatggagccctgggaggggaggttctggtttctagtcacgttctgctttttgacctgggtgtgttcggtttgtaaaaattcatcaaccttgtgcacttacaatgtgtcctctggagtgtttttgactgcttgttgtcatgaatctaatcaagcctttagccctaacttaagaaattcaagggaagaaatgcatttaagaagaacgtccatctaacaagaacttcaggaaattcaggtaaatgatactaaaaggaaacattcctaacgtgggacaatctaggtaaatggcctgatctcttcaaaagatcgatgtcataaaaataaaagtttggggacagaaatggaaagaacttaagagtcaagtgtggtgaatactgattggttcttagttagaaaaaaaaagtcctaaaaggtttttgggatgactggggacatacgaatatggactggttgttacagaattaaattttcttagcagtggtgataacaatggttattgtagaataagggctttatttttattttttgaaatggatctcactctgtcgcccaggctggagtacagtggccccatcccagctcaccgcaacctctgcttcccagtttcaagtgattctcctgcctcagcctccccagtagctaggattataggcacgtgcgccaccacgcccggctaatttttgtatttttttgtagagacggggtttcaccatgttggccaggttggtctcggactcctgacctcaggtgatccgcccgccttggcctcccaaagtgctgggattgcaggcgtgagccaccgcgcctggccaagggccttatttttaagagatacatgctcagtatttggtgttggggtgaaatgtcatatctacaattttcaaatggttccgaaaagacacacagacgaagcaaatatggcaaactgttaacaagtactggaatctacgtggtatcattatattgtcttttaaagttttctctgtttagttttctttttataatacaaaattaaggggaactgcaggctagacagttttgatccgatgttattctgctaatcttttaaaggtgtcttgcggtgactcacgcctgtaatcccagcacttcgggaggctggggcgggtggatcacctaaggtcaggagttcaagaccagcctggccaaaatggagaaaccccgtctctactaaaaatataaaaactagccttagcccgtcgtggtggcgggcgcctgtggttccagctacccaggaggctgaagcaggagaatctgaagcagaaggctgaagcagaaggcagagtggggactcccccacgctttggctttcagaacaagggttcgaattctggggctattactttctgaccgtgtggttttctgcaagcatcttaacccgggcctcagtttcctcatctgtaaatgggaacaggaattcctacctcttatggttgtactgggcgttatgtgagcccaaggagccctgacctgcggtgagaggctggaggccgaagggcaaggttcgaggggctctgggtgcctgggacaacctctgggcaacagggagaggcggctgcggggccaagtccctcctaagcggccacgcgagaggccctgagtcgagaagggttacggcgcttcccagagcccaccccgcccaacgtgtcacaaataaagctggcctttctccgattccctgattgcagccattcagggagcagccccttgcccacgcatccattagtcgaggcggtggctgcgtgtgcagtgctacagggttcagcgcctgcctcggctccggaatcaggctgtttccttctagacctcccatgggggattcaagccggcgtccgggtcaaagaacagggacaaagtcctcctgccacgggggaccatctgcaggcaaagtgaagaatgaggagcttcggcaaaatgccgactaaggcctccttaggttttgccccactccaagatggaaggcctgaggcttcacactgcccccgaagttcctttcccattggctatctgggaattgagttttccaataatgcggacgctgattggtcaatccaggacggttgctcaagccattggcgcagccgccattggagggcggctctcaaaagttttcagacacaaattaggttcgagggaggaaacggagaggaaagggaaaacttgagacggaggcgggactaaggaaacggcagcttgcattggtttattagaggccaaggggcggctcttgaacgttccttcctcttgattagtcctatttaggaaaagagggcgggtactgaggaaaagcggcagaagcgcctgcttccattggtcagtcctggcaggaggcggagcacccgcggcagctgattggtgcgggaggcaaggtgggcggggctctgagccggaggttttgttgtgagggtcggttgtcaagcagcggccaatcaaggcaggggatggaggcaagtgggggtcgcgcctggagcggagcctcggcctccggagccgcagctgcaggtggagtgggcaaggggacgaggtggcgaggggacggtgggccctgggctgggccgagccaggcggggctggctgggcttgcgggcagagagctctgagcgtggggaggctagagcccgtactccgcaagcagagggttgggaggatcagccgtggccgagggacctgcccccgcccccggacgagaggggtcggggtggaggccggagggggcaaaaccagggaggccggaagcagagctgggggtctgcagaaggacaggtaatgaatagggagaagagaagtaggagaatgaatgaatgggagaccccgcgagcatatgggaaagggcagtaacgggagtctggcgaggcaggggccacgtgagggatatcgggagacaggatgtgcataagtgggagactcagggggcagggagaaaagggggtgtgaacggaggactagagaggcagacccggggacccaggagaaaggggacggaggggagcgggctcatgggaaagaggtgaagtggctgtgggaaggaggtgggaggctccatgaggaggccttttagagttgaagagtcatagccacttacgcccagactggaggcctagttcctagctctgtccttgggaatcgcagggagcaggagcggttcccttgccaggagctggggaattggaccatcagggtcgtcttcgagattctttccaaggaggacttcagtggccgtctctgggatgcctttcctaggcccctaagcttagcttctgactccgctctcccacatcccacacgtcagacaaaaacaacgactcgcaggaaatctatgtgaattgcagacacgtggtcttctccgccccactgcggctgctgcactttaggcagccagcatcccggaacagagctgcagctcattatcctggcctctgggaggagtttctttttccttacgttccaaatcaccctacctgaggtgccccctctgcagattcccaaacctaatttgcagtgcagcttctgactctggtggctttggtgggtgtcagtctttatcaagtggtcttggtgatccagggagcaacagctcttaccaagcattttctaacatgacgtcacctcttgtttgtattgcagccctgtattgagctgagatggctcgagcctaacattccatgatccaggatcgtgacagatgtgcacaggctgctgctgttgctgctgtgggtaatttggaaccacgaggcaccccagggccagaagacgaggcattctgtctgcctggatgtgtgggaactctctgccaacttgattggtggatctggggggggatccacccccaccccacgaggaaagcacagtttattttgtgggtggggcttcaggtgccagccagctgaaggatggccacccctgtggtcaccaagacagcctggaagttgcgtgagtggttttcatttttctttatcaccccatttattctgttagcggcttgttgctgggaggcctgaacccacagctttgtttcctgttcttggcacaggaggagactcctagacttgggagtaagatagaccattatgtaaatcatgactgtggcacttcttagctgggtgacactgggcaggtgacttaacctctctgaggctcagttttcttatatgtacaatgagatgacgcctgcattctatggttgctgtgaaattcaagtgacaggatgaacccatcctaaagcacttagcacagcatttccagttaggctgacagtggggtgagaaatcctgaaagatgttcacagcattctcagacatctcacaagtcaaacttccccagtcagataaaagcatcttgggcctgggatgggggaaggagtgggagcgaggaggggcgggcagagggatgcagacagggctcggattgtaactgatgggcactgtccactcccaccattgccctatacaagtggatctggactctttcatctgaagacttcatactttaagaattattgaggaccccagagtgcttttgtttgttggagttatatatctgtcagtatttaccacgttagaagttaatactgagacattttcaaacaagagtatataatcaaataggcctctagtgatgttctgggaaactccaccatatgcttgagagcaaatgagagtgcaaaaggcagatgccatcttagtgttattgtgaaaatccttttgtcttctcagaccccccgaaaggatcttgaggatcccaagcatccccagatcatattttgagaattcccctacacattggcaccttggtgggccctgccccacctattgtaactggttggcatagcttttgtgtgctccacctggtcactgtctgctgccagctgtccctgggctggttttcaggagctgggacaagactccacacttttttttttttttgagacagagtctcactgtcacccaggctggagtacagtggtgcaatctcagctcactgcaacctctgcttcccgggttcatgcgattctcgtgcctcagcctcccgagtagctgggatcacaggcacccgccaccacacccggctaatttttgtatttttagtagagacggggtttcaccatgttggccagactcgtctcgaacccctgacctcaggtgatccacgtgcctcagcctcccaaagtgctgggatgacaggcatgagccaccatgcctggccaagactccacactttttaaccatgaatttaaccataagactctgggcaaagctctttgcagggcctctgtttccttgtttgtaaagtgagaggtttgggccattttcatgttgttccccaaaactctagggctctgggagaaccctgttatggttccccaaggaaggcacactttggtcagagtggctttgtaattattgggattacgtattcatcccttcgacagctggcctttccccagagctaggcactggggagccactgggggacaaagtagtcaaggtctctgtacagcgggagctcagagcctggggagagcaacaggcaggaactggataaccgtatccctctgtgtctcctctagttgcaagctggtgcctgtgctttgaatcagttagctggggggtaggggtaggggtggggtgggaatgctgcaggctgcatgaacagcaagtgcaaaggccctgaggcaggaggctcagtgtattggaaggactcaagggaggccatgggcagtggcacagcagcaggaggaatgtggggccgcacggacctactgagttctcaggaccccagccctcctgaggctgccgtgctttatcataaaggcaaggccaagccatcagtgtgtgcgagcaggaggtaatgagatcaggcgtattgggcatctgctgctgctgctgatttcatgtgcacggtggtgtccgtgggaatcaactctgaagagcccagggccacgtgacctctggctccttgtggctccagggtctggtgaggatcagaggtgcgtggcccacatgaggtcgttgaaacctagtactttgtatcttgcatttgggatgctgatcctcagcccctctggccacgccgcaccatgttccccagctttggctggatgtggggcccaggttgtactcccagagcttggcctgccagtagacactgaggatttttattttttatttttggtatgaaaatcaagtattcggcctgggctgttggttgctgtccaacaagccaggatgaaggaggagctcttggggtggtgccccgtgcctcctttgcaggtgcctgtgctgtgtccctgcccctctgccctccctctgtgggctccagtcagtccctggtcaggctgcttagaggggagtgatgtgggctcctccagaagggcccaacttctaaatctttctcactccaaagtctgcggttttgccagctcagtgtcccgcccccaccaccatctgattatactggggcatatttcgtgcaaggcctagaacaggcacccaggaaatactgatattatgaatgaatgcccctgactccaggggcagcagtcctgaggcccagtgaggtggggcccagccagacactttccctgggaggagtgagggccaggggacagacagagccctccaggtaggccagggggagcgagcagtgcctccacggagaggacaccaggctcgggcacggaatgccagggagaaggtgctttgccctctttctgggtcaggtggaaaccttgaacagacacgtctgtggctggaattcctcaggtttctgtcccgacagtgtccagaggacagaaggctctcatcgagacgggactaaagtggggcccagctccctgggatccccatggcgaactcccagcgccctggcccaggtttgggcccacagggaaccctcgcccttgctggcgctgctgcctgtgctggctctgccccgaccggcccaggaggcagggtgtcatcagtgagattcagcctgcgacttgtcccctgggtattcctggtggccccttggagcccaggtttctggcaagcagcttccctgggcccagtttcccaacctccttgtggtctgaagcccgcagcagagacacccaggcagggtggagtcggagctggggtgcaggaggggcctctgtggagcgccgtggctccaacacccttttccttggcgtcacccacgctggccttccgggtgcctcggggcgtcagcaccttggggttttcccctggcctgtgtggggagaactgtcttttttctcccttctttccaggaggagctcatgcagggatgggttctgaggcccgggccgcctcttggttccctgcctgtgctttgctccctgcggagtcctccgaggctcctgtctgccatctccacggaccaggccagggccttgggctgtctgcacaggctcctcctctgtgtggtcagccctcacccccaccccagctgctcagtctgttgcctcctgccccctcctcatgaagcccaccctctggtgcccgcccaggcccccatgcccactctctcatggtgactagccccgagcctgcccaatgtcacggagccctcgcctgctactaagcagcacgtaggcgcgctctgagggagtcctcagcatcaggtgtgagcagacaccacgggcatccccactttccagacgaggagccaggccctcagaggacaagtgacctagtagccaaggccacgcaatagcagatcacagacctcagaccagaacctgatccgtgattgtgaatctgagccgaagccctgtgcaggcttacctgggggcagcttgtctagaggtgacttcggttgttcttaaagtgtgttctccaaagcagggtttgtatgtacacacaagcagcagctgagaggtgtgtaggcagtgcatgggtcaattttttttatttcaataattgtttttctttttgtatcatagaaagagtatcatgagtatatcaaacttgtaatttcatggacattgcttaagcccaagctaataaaaatagcaagtcaattttaaaaattgcgtataactagtcaatattaccaggtgatgtgcagaaacaggaagaaaatcgtgaagtctaaaggtaggaa

SEQ ID NO: 1068 - DNA, 3012 bp, Homo sapiens
atggagatggctaacagctagagcaggctgtcctcggagggagacattccatctccagacacccagagacgctccagaatggaggtcctgagggagaaggtggaggaggaggaggaggccgagcgggaggaggcggccgagtgggctgaatgggcgaggatggagaaaatgatgaggccagttgaggtgcggaaggaggaaatcaccttaaagcaggagacgctcagagacctggagaagaagctgtcagagatccagatcactgtctcagcggagctcccggcctttaccaaggacactattgacatctccaagctgcccatttcctacaaaaccaacacacccaaggaggaacacctgctgcaggtggcagacaacttctcccgccagtacagccatctgtgcccggaccgcgtgcccctcttcctgcaccccctgaacgagtgtgaagtgcccaagttcgtgagcacaaccctccggcccacactgatgccctaccccgagctctacaactgggacagctgtgcccagtttgtctccgacttcctcaccatggtgcccctgcctgaccctctcaagccgccctcgcacctgtactcctcgaccactgtgctcaagtaccagaaggggaactgctttgacttcagtacgctgctctgctccatgcttatcggctctggctatgatgcttactgcgtcaacggctacggctcgctggacctgtgccacatggacctgacgcgggaggtgtgcccactcactgtgaagcccaaggaggaagcggagaaggcaaagccggatgccctgcacggcctgcgggtgcactcctgggtccttgtgctatcggggaagcgcgaggtgcctgagaacttcttcatcgacccattcacaggacatagctacagcacccaggatgagcacttcctgggcatcgaaagcctgtggaaccacaagaactactggatcaacatgcaggattgctggaactgctgcaaggtgcctagggagggggagctgggtgaccctgaggaacggctcgctcatttgtttggtggcttggactgtctgtccatctgcatggcggacgtagccagtctgctgctcctgaactcccgtctcaccatcctgtcccagctgccctcatggtgtatgagcctcttcctgcaacaacaggacttgatctttgacctgggtgaccctgtgagatgggagtacatgctcctggggactgataagtctcagctgtccttgactgaagaagacgacagtgggataaacgatgaggatgatgtggaaaatctgggcaaggaggatgaggataagagcttcgacatgccccactcgtgggtggagcagattgagatctccccggaagaggaggccatgggcagtgcccagatggtgcggggggtctcaggaccggagaggggcagcaagaagagaccacagctgactgtgtccacagcatttgagacccgctgcccgaacgggaagaaggtgattcagtacaagagggcaaagctggagaagtgggccccgtacctcaatagcaatggccttgtgagccgcctcaccacctatgaggacttgcagtgtaccaatattttggagataaaggagtggtaccagaaccgggaagacatgctggagctgaaacacataaacaagaccacagacctgaagacagactacttcaagcctggccacccccaggctctgcgcgtgcactcgtacaagtccatgcaacctgagatggaccgtgtcattgagttttatgaaacggcccgtgtggatggcctgatgaagcgggaggagacacccaggacaatgacagagtactatcaaggacgcccagacttcctctcctaccgccatgccagcttcggaccccgagtcaagaagctcactctgagcagtgcagagtcaaacccccggcccattgtgaaaatcacagagcggttcttccgcaacccagcgaagcccgcggaggaggacgtggcagagcgcgtgtttctggtcgcggaggagcgcatccagctgcgctaccactgccgtgaggaccacatcacggcctccaagcgcgagttcctgcggcgcaccgaggtggacagcaaaggcaacaagatcatcatgacgcccgacatgtgcatcagcttcgaggtggagcccatggagcacaccaagaagctgctctaccagtacgaggccatgatgcacctgaagagggaggagaagctgtccagacatcaggtctgggagtcagagctggaggtgctggagattctgaagcttcgagaggaagaggaggcggcgcacacactgaccatctccatctatgacaccaagcggaatgagaagagcaaggaatatcgggaggccatggagcgcatgatgcacgaagagcacctgcggcaggtggagacccagctggactacctggccccattcctggcccagctcccgccaggagagaaactaacatgctggcaggcggtgcgcctcaaggatgagtgcctcagcgacttcaagcagcggctcatcaacaaggccaacctcatccaggcccgctttgagaaggagacccaggagctgcaaaagaagcagcagtggtaccaggagaaccaggtgacgctgacacccgaggatgaagacctgtacctgagttactgctctcaggccatgttccgcatccgcatcctggagcagcgcctcaatcgacacaaggaactggccccactgaagtacctggctctggaggaaaagctctacaaggacccacgcctgggggagctccagaaaatattcgcttgatgtccctcctggggcctcagccagagctgccagagaaaggaaacctcttcccgcagcctggctcctgtgttccctctatccagccaatgcctgtttacacagacacctggcctcactgccagcccacctcccctacagccctgtttgttcctgcttctcatgattttcctgtaaataaacacactcttaatttgccatttg

SEQ ID NO: 1069 - protein, 904 aa, Homo sapiens
MEVLREKVEEEEEAEREEAAEWAEWARMEKMMRPVEVRKEEITLKQETLRDLEKKLSEIQITVSAELPAFTKDTIDISKLPISYKTNTPKEEHLLQVADNFSRQYSHLCPDRVPLFLHPLNECEVPKFVSTTLRPTLMPYPELYNWDSCAQFVSDFLTMVPLPDPLKPPSHKSTTVLKYQKGNCFDFSTLLCSMLIGSGYDAYCVNGYGSLDLCHMDLTREVCPLTVKPKEEAEKAKPDALHGLRVHSWVLVLSGKREVPENFFIDPFTGHSYSTQDEHFLGIESLWNHKNYWINMQDCWNCCKVPREGELGDPEERLAHLFGGLDCLSICMADVASLLLLNSRLTILSQLPSWCMSLFLQQQDLIFDLGDPVRWEYMLLGTDKSQLSLTEEDDSGINDEDDVENLGKEDEDKSFDMPHSWVEQIEISPEEEAMGSAQMVRGVSGPERGSKKRPQLTVSTAFETRCPNGKKVIQYKRAKLEKWAPYLNSNGLVSRLTTYEDLQCTNIIKEWYQNREDMLELKHINKTTDLKTDYFKPGHPQALRVHSYKSMQPEMDRVIEFYETARVDGLMKREETPRTMTEYYQGRPDFLSYRHASFGPRVKKLTLSSAESNPRPIVKITERFFRNPAKPAEEDVAERVFLVAEERIQLRYHCREDHITASKREFLRRTEVDSKGNKIIMTPDMCISFEVEPMEHTKKLLYQYEAMMHLKREEKLSRHQVWESELEVLEILKLREEEEAAHTLTISIYDTKRNEKSKEYREAMERMMHEEHLRQVETQLDYLAPFLAQLPPGEKLTCWQAVRLKDECLSDFKQRLINKANLIQARFEKETQELQKKQQWYQENQVTLTPEDEDLYLSYCSQAMFRIRIQRLNRHKELAPLKYLALEEKLYKDPRLGELQKIFA

SEQ ID NO: 1070 - DNA, 2949 bp, Homo sapiens
atggagatggctaacagctagagcaggctgtcctcggagggagacattccatctccagacacccagagacgctccagaatggaggtcctgagggagaaggtggaggaggaggaggaggccgagcgggaggaggcggccgagtgggctgaatgggcgaggatggagaaaatgatgaggccagttgaggtgcggaaggaggaaatcaccttaaagcaggagacgctcagagacctggagaagaagctgtcagagatccagatcactgtctcagcggagctcccggcctttaccaaggacactattgacatctccaagctgcccatttcctacaaaaccaacacacccaaggaggaacacctgctgcaggtggcagacaacttctcccgccagtacagccatctgtgcccggaccgcgtgcccctcttcctgcaccccctgaacgagtgtgaagtgcccaagttcgtgagcacaaccctccggcccacactgatgccctaccccgagctctacaactgggacagctgtgcccagtttgtctccgacttcctcaccatggtgcccctgcctgaccctctcaagccgccctcgcacctgtactcctcgaccactgtgctcaagtaccagaaggggaactgctttgacttcagtacgctgctctgctccatgcttatcggctctggctatgatgcttactgcgtcaacggctacggctcgctggacctgtgccacatggacctgacgcgggaggtgtgcccactcactgtgaagcccaaggaggaagcggagaaggcaaagccggatgccctgcacggcctgcgggtgcactcctgggtccttgtgctatcggggaagcgcgaggtgcctgagaacttcttcatcgacccattcacaggacatagctacagcacccaggatgagcacttcctgggcatcgaaagcctgtggaaccacaagaactactggatcaacatgcaggattgctggaactgctgcaaggtgcctagggagggggagctgggtgaccctgaggaacggctcgctcatttgtttggtggcttggactgtctgtccatctgcatggcggacgtagccagtctgctgctcctgaactcccgtctcaccatcctgtcccagctgccctcatggtgtatgagcctcttcctgcaacaacaggacttgatctttgacctgggtgaccctgtgagatgggagtacatgctcctggggactgataagtctcagctgtccttgactgaagaagacgacagtgggataaacgatgaggatgatgtggaaaatctgggcaaggaggatgaggataagagcttcgacatgccccactcgtgggtggagcagattgagatctccccggaagaggaggccatgggcagtgcccagatggtgcggggggtctcaggaccggagaggggcagcaagaagagaccacagctgactgtgtccacagcatttgagacccgctgcccgaacgggaagaaggtgattcagtacaagagggcaaagctggagaagtgggccccgtacctcaatagcaatggccttgtgagccgcctcaccacctatgaggacttgcagtgtaccaatattttggagataaaggagtggtaccagaaccgggaagacatgctggagctgaaacacataaacaagaccacagacctgaagacagactacttcaagcctggccacccccaggctctgcgcgtgcactcgtacaagtccatgcaacctgagatggaccgtgtcattgagttttatgaaacggcccgtgtggatggcctgatgaagcgggaggagacacccaggacaatgacagagtactatcaaggacgcccagacttcctctcctaccgccatgccagcttcggaccccgagtcaagaagctcactctgagcagtgcagagtcaaacccccggcccattgtgaaaatcacagagcggttcttccgcaacccagcgaagcccgcggaggaggacgtggcagagcgcgtgtttctggtcgcggaggagcgcatccagctgcgctaccactgccgtgaggaccacatcacggcctccaagcgcgagttcctgcggcgcaccgaggtggacagcaaaggcaacaagatcatcatgacgcccgacatgtgcatcagcttcgaggtggagcccatggagcacaccaagaagctgctctaccagtacgaggccatgatgcacctgaagagggaggagaagctgtccagacatcaggtctgggagtcagagctggaggtgctggagattctgaagcttcgagaggaagaggaggcggcgcacacactgaccatctccatctatgacaccaagcggaatgagaagagcaaggaatatcgggaggccatggagcgcatgatgcacgaagagcacctgcggcaggtggagacccagctggactacctcaaggatgagtgcctcagcgacttcaagcagcggctcatcaacaaggccaacctcatccaggcccgctttgagaaggagacccaggagctgcaaaagaagcagcagtggtaccaggagaaccaggtgacgctgacacccgaggatgaagacctgtacctgagttactgctctcaggccatgttccgcatccgcatcctggagcagcgcctcaatcgacacaaggaactggccccactgaagtacctggctctggaggaaaagctctacaaggacccacgcctgggggagctccagaaaatattcgcttgatgtccctcctggggcctcagccagagctgccagagaaaggaaacctcttcccgcagcctggctcctgtgttccctctatccagccaatgcctgtttacacagacacctggcctcactgccagcccacctcccctacagccctgtttgttcctgcttctcatgattttcctgtaaataaacacactcttaatttgccatttg

SEQ ID NO: 1071 - protein, 883 aa, Homo sapiens
MEVLREKVEEEEEAEREEAAEWAEWARMEKMMRPVEVRKEEITLKQETLRDLEKKLSEIQITVSAELPAFTKDTIDISKLPISYKTNTPKEEHLLQVADNFSRQYSHLCPDRVPLFLHPLNECEVPKFVSTTLRPTLMPYPELYNWDSCAQFVSDFLTMVPLPDPLKPPSHKSTTVLKYQKGNCFDFSTLLCSMLIGSGYDAYCVNGYGSLDLCHMDLTREVCPLTVKPKEEAEKAKPDALHGLRVHSWVLVLSGKREVPENFFIDPFTGHSYSTQDEHFLGIESLWNHKNYWINMQDCWNCCKVPREGELGDPEERLAHLFGGLDCLSICMADVASLLLLNSRLTILSQLPSWCMSLFLQQQDLIFDLGDPVRWEYMLLGTDKSQLSLTEEDDSGINDEDDVENLGKEDEDKSFDMPHSWVEQIEISPEEEAMGSAQMVRGVSGPERGSKKRPQLTVSTAFETRCPNGKKVIQYKRAKLEKWAPYLNSNGLVSRLTTYEDLQCTNIIKEWYQNREDMLELKHINKTTDLKTDYFKPGHPQALRVHSYKSMQPEMDRVIEFYETARVDGLMKREETPRTMTEYYQGRPDFLSYRHASFGPRVKKLTLSSAESNPRPIVKITERFFRNPAKPAEEDVAERVFLVAEERIQLRYHCREDHITASKREFLRRTEVDSKGNKIIMTPDMCISFEVEPMEHTKKLLYQYEAMMHLKREEKLSRHQVWESELEVLEILKLREEEEAAHTLTISIYDTKRNEKSKEYREAMERMMHEEHLRQVETQLDYLKDECLSDFKQRLINKANLIQARFEKETQELQKKQQWYQENQVTLTPEDEDLYLSYCSQAMFRIRIQRLNRHKELAPLKYLALEEKLYKDPRLGELQKIFA

SEQ ID NO: 1072 - DNA, 2916 bp, Homo sapiens
atggagatggctaacagctagagcaggctgtcctcggagggagacattccatctccagacacccagagacgctccagaatggaggtcctgagggagaaggtggaggaggaggaggaggccgagcgggaggaggcggccgagtgggctgaatgggcgaggatggagaaaatgatgaggccagttgaggtgcggaaggaggaaatcaccttaaagcaggagacgctcagagacctggagaagaagctgtcagagatccagatcactgtctcagcggagctcccggcctttaccaaggacactattgacatctccaagctgcccatttcctacaaaaccaacacacccaaggaggaacacctgctgcaggtggcagacaacttctcccgccagtacagccatctgtgcccggaccgcgtgcccctcttcctgcaccccctgaacgagtgtgaagtgcccaagttcgtgagcacaaccctccggcccacactgatgccctaccccgagctctacaactgggacagctgtgcccagtttgtctccgacttcctcaccatggtgcccctgcctgaccctctcaagccgccctcgcacctgtactcctcgaccactgtgctcaagtaccagaaggggaactgctttgacttcagtacgctgctctgctccatgcttatcggctctggctatgatgcttactgcgtcaacggctacggctcgctggacctgtgccacatggacctgacgcgggaggtgtgcccactcactgtgaagcccaaggaggtatgtggttgggtgatgggaggggagatgggccgtcacactccggttgatggtgcagtctacatcagaactcagctctcctgctggttccccagccccagggagatgtctgggcccctgacactcctcttccagccatctgactcgtagtcacccacctttccttggcaggaagcggagaaggcaaagccggatgccctgcacggcctgcgggtgcactcctgggtccttgtgctatcggggaagcgcgaggtgcctgagaacttcttcatcgacccattcacaggacatagctacagcacccaggatgagcacttcctgggcatcgaaagcctgtggaaccacaagaactactggatcaacatgcaggattgctggaactgctgcaaggacttgatctttgacctgggtgaccctgtgagatgggagtacatgctcctggggactgataagtctcagctgtccttgactgaagaagacgacagtgggataaacgatgaggatgatgtggaaaatctgggcaaggaggatgaggataagagcttcgacatgccccactcgtgggtggagcagattgagatctccccggaagcatttgagacccgctgcccgaacgggaagaaggtgattcagtacaagagggcaaagctggagaagtgggccccgtacctcaatagcaatggccttgtgagccgcctcaccacctatgaggacttgcagtgtaccaatattttggagataaaggagtggtaccagaaccgggaagacatgctggagctgaaacacataaacaagaccacagacctgaagacagactacttcaagcctggccacccccaggctctgcgcgtgcactcgtacaagtccatgcaacctgagatggaccgtgtcattgagttttatgaaacggcccgtgtggatggcctgatgaagcgggaggagacacccaggacaatgacagagtactatcaaggacgcccagacttcctctcctaccgccatgccagcttcggaccccgagtcaagaagctcactctgagcagtgcagagtcaaacccccggcccattgtgaaaatcacagagcggttcttccgcaacccagcgaagcccgcggaggaggacgtggcagagcgcgtgtttctggtcgcggaggagcgcatccagctgcgctaccactgccgtgaggaccacatcacggcctccaagcgcgagttcctgcggcgcaccgaggtggacagcaaaggcaacaagatcatcatgacgcccgacatgtgcatcagcttcgaggtggagcccatggagcacaccaagaagctgctctaccagtacgaggccatgatgcacctgaagagggaggagaagctgtccagacatcaggtctgggagtcagagctggaggtgctggagattctgaagcttcgagaggaagaggaggcggcgcacacactgaccatctccatctatgacaccaagcggaatgagaagagcaaggaatatcgggaggccatggagcgcatgatgcacgaagagcacctgcggcaggtggagacccagctggactacctggccccattcctggcccagctcccgccaggagagaaactaacatgctggcaggcggtgcgcctcaaggatgagtgcctcagcgacttcaagcagcggctcatcaacaaggccaacctcatccaggcccgctttgagaaggagacccaggagctgcaaaagaagcagcagtggtaccaggagaaccaggtgacgctgacacccgaggatgaagacctgtacctgagttactgctctcaggccatgttccgcatccgcatcctggagcagcgcctcaatcgacacaaggaactggccccactgaagtacctggctctggaggaaaagctctacaaggacccacgcctgggggagctccagaaaatattcgcttgatgtccctcctggggcctcagccagagctgccagagaaaggaaacctcttcccgcagcctggctcctgtgttccctctatccagccaatgcctgtttacacagacacctggcctcactgccagcccacctcccctacagccctgtttgttcctgcttctcatgattttcctgtaaataaacacactcttaatttgccatttg

SEQ ID NO: 1073 - protein, 520 aa, Homo sapiens
MQDCWNCCKDLIFDLGDPVRWEYMLLGTDKSQLSLTEEDDSGINDEDDVENLGKEDEDKSFDMPHSWVEQIEISPEAFETRCPNGKKVIQYKRAKLEKWAPYLNSNGLVSRLTTYEDLQCTNIIKEWYQNREDMLELKHINKTTDLKTDYFKPGHPQALRVHSYKSMQPEMDRVIEFYETARVDGLMKREETPRTMTEYYQGRPDFLSYRHASFGPRVKKLTLSSAESNPRPIVKITERFFRNPAKPAEEDVAERVFLVAEERIQLRYHCREDHITASKREFLRRTEVDSKGNKIIMTPDMCISFEVEPMEHTKKLLYQYEAMMHLKREEKLSRHQVWESELEVLEILKLREEEEAAHTLTISIYDTKRNEKSKEYREAMERMMHEEHLRQVETQLDYLAPFLAQLPPGEKLTCWQAVRLKDECLSDFKQRLINKANLIQARFEKETQELQKKQQWYQENQVTLTPEDEDLYLSYCSQAMFRIRIQRLNRHKELAPLKYLALEEKLYKDPRLGELQKIFA

SEQ ID NO: 1074 - DNA, 1289 bp, Homo sapiens
tgcactcgtacaagtccatgcaacctgagatggaccgtgtcattgagttttatgaaacggcccgtgtggatggcctgatgaagcgggaggagacacccaggacaatgacagagtactatcaaggacgcccagacttcctctcctaccgccatgccagcttcggaccccgagtcaagaagctcactctgagcagtgcagagtcaaacccccggcccattgtgaaaatcacagagcggttcttccgcaacccagcgaagcccgcggaggaggacgtggcagagcgcgtgtttctggtcgcggaggagcgcatccagctgcgctaccactgccgtgaggaccacatcacggcctccaagcgcgagttcctgcggcgcaccgaggtggacagcaaaggcaacaagatcatcatgacgcccgacatgtgcatcagcttcgaggtggagcccatggagcacaccaagaagctgctctaccagtacgaggccatgatgcacctgaagagggaggagaagctgtccagacatcaggtctgggagtcagagctggaggtgctggagattctgaagcttcgagaggaagaggaggcggcgcacacactgaccatctccatctatgacaccaagcggaatgagaagagcaaggaatatcgggaggccatggagcgcatgatgcacgaagagcacctgcggcaggtggagacccagctggactacctggccccattcctggcccagctcccgccaggagagaaactaacatgctggcaggcggtgcgcctcaaggatgagtgcctcagcgacttcaagcagcggctcatcaacaaggccaacctcatccaggcccgctttgagaaggagacccaggagctgcaaaagaagcagcagtggtaccaggagaaccaggtgacgctgacacccgaggatgaagacctgtacctgagttactgctctcaggccatgttccgcatccgcatcctggagcagcgcctcaatcgacacaaggaactggccccactgaagtacctggctctggaggaaaagctctacaaggacccacgcctgggggagctccagaaaatattcgcttgatgtccctcctggggcctcagccagagctgccagagaaaggaaacctcttcccgcagcctggctcctgtgttccctctatccagccaatgcctgtttacacagacacctggcctcactgccagcccacctcccctacagccctgtttgttcctgcttctcatgattttcctgtaaataaacacactcttaatttgccatttg

SEQ ID NO: 1075 - protein, 354 aa, Homo sapiens
MQPEMDRVIEFYETARVDGLMKREETPRTMTEYYQGRPDFLSYRHASFGPRVKKLTLSSAESNPRPIVKITERFFRNPAKPAEEDVAERVFLVAEERIQLRYHCREDHITASKREFLRRTEVDSKGNKIIMTPDMCISFEVEPMEHTKKLLYQYEAMMHLKREEKLSRHQVWESELEVLEILKLREEEEAAHTLTISIYDTKRNEKSKEYREAMERMMHEEHLRQVETQLDYLAPFLAQLPPGEKLTCWQAVRLKDECLSDFKQRLINKANLIQARFEKETQELQKKQQWYQENQVTLTPEDEDLYLSYCSQAMFRIRIQRLNRHKELAPLKYLALEEKLYKDPRLGELQKIFA

SEQ ID NO: 1076 - DNA, 71083 bp, Mus musculus
  misc_feature (1)...(71083): n = A,T,C or G
tatagttgagtgtatatgcatggtttacatggatacgtgtgtgtatgtgcccatgtgtctctatacatgcatgtacacatgggtgtgtgtgtgcatatgtcagctagacatcactgttggatgtgtcccagtctattacgctattttctgagacaggaacatggtgatttggcaaggctggccactgagccccaggggtcctcctcttgcaacttatccaggagcatgggagcacctctctgggtgcgagggagcacaggagcatgccactgtcccaggctttagatctttgtgtctgcattttactgagggagccatgaccagagcctgtaatagagtgttttctgtaattggtatgtgaaaggtatttaaactagcatgccactcttgttctgtatctgcgctttgttggctgagcacttcacatttgcttttgcttttctcatcctctggacatctcagattataaaccctagattctctcttaatcttactctttttcctcagtccacatatatgtatgtacatcgcctgtgctgttgagttgtccatccacttaacaaaaactagaatcatgtgggaagagggagccccaagttgaggaattgtctacagcagattgcccgtaggcacatctatgggggcattttcttgattaatgatcagatgggtctggcccaatatgagaagtgtcatccttgggcaggtggtcctgggtataagaaaacaggcagagtaagccacaggactggggtgaggtggagggtatggtggagggggccgggggagggggggttaagccagtccagtaagcagagttcccctatgactttcagttcctgcctcaggttcagggccccgacttccctcagtgggttgttgggggttggttttgagcattgtgtatgcagatgctgattgctgtgccctgagatctcattgcagtccacgtgttgacattatcaagcatttcctgtctcaatgtcctgtaaaaacatgtttttttttttctcccattacttctgattggttaataaagagctgatcagccaatagccgggcaggagaggaggcagggcttcagattccagttagagggtcccgagtggtcgggaccagagagcgagggattccccatgaggtgaatgagagagttgccacgaggagacagatggagcaggagcaggcaggatgagactaatgtggtaggcaaagtgccacgtgggtaggaagcaggccaggccaccatagtagggttagaacaggtgagaagcctgcccagctatagtgcaagaggctcattaataagtatatcaggcctcggtgcctggtattatttcaatggagggcatggaaaagcccagtgcttttacagcaggctgcaacctgggagctggaagatgaaggcctttcttcctcgattttggtcatggtgtttttcacagcagcagcaagcacatgaagacaccttcttatgctgccttcttgagtatcaatttacatttatttgtgtgtgtaagtatgtgagccacatgggtgcagttgccagcggtcatcagttttggctacacaggtcgtgcagtgagccctggaattcctctgcctctccctttgcctcatggaactggggttccaccacacctggaacctggctttatatgggttctaaggagccaaagccacgttcttgagtttgctccacagatgctgtatctaaggagccatctgcccagctcaacattcctttcttcatatattgtgttttaatatcttcttccctgcccctcccaccaccatcgctgaatgctatttaggacttgcagacttaggacatgagaggtttgggttttttcccccttctcctatgtcttagcatttctgtcccattcccttcaataacgttggctggatctctgtaacatctcatgtctagtcttatttgcactgatttcctttaaaatcagtggccattcccctactgtcctggggagccggtgaggcagcggctaacaccctcctttcgtttcctggttcccctcctggtttccatgggattatcttccttctctggtttttccctcatgggctccttacatgtcactctctgtctctgtctctgttgattttatttgattatctgtcccttctgaatagagatgtcttatttgctacagaaatggaaaataccacctctcttagttcggattttacttctgtgaacagacactatgaccaaggcaaaccttataaggccaacttttaattagggctggcttacaagttcagaggttcagtccattatcatcaaggtaggaacatggcagcatccaggcaggcatggtgcaagaggagctgagagttctacatcttcatctaaacgctgctagaagaatactggctttcaggcagctagggtgaaggtcttaaagcccatgtccacagtgacacactccaacaaggccccacctactccaacaaggccacacctactccaacaaggccacacctactccaacaaggccacacccactccaacaaggccacgcctcctaataatgccattccctgggccgagcatatacagaccatcacaccacctctgctctctgaaagcatatagtagcatgtctcattagtatgactttctacaaagccttgctcattttgtactcatttctatgactctgtgagttccagatgaggatcgggcttctgtagggatggggttcccatcagaggatcctggggacctgtcttgatctttatcatctggttgccagggaatctccaggtcagaggtcacctggaagcacattctattgactggagtctgagtcaagtctcttcatctggcaactgtctccccagggtggtgttgctgggcagaacccactcttcctgcctttgactgggacacctgacacaccgaagcaggcagttgctcccagaactcccctctggcatgtctttctttcatccagttccatttgtaccccaaggatattggtaggattcaaaaagaggggtccatgtctggaaagaggagctcttaaatcactgctgccaggaatggaaatggagatttctgagagagagagagagagagagagagagagagagagagagagagagagaggagagaaagtagaactgtgtgacccacctgtgcctggcctaagcattctcccgaggacaccacatctgaccatggtgacacttaacatgtgtgttattgctgctgtgttcctaagagatagggagcggagccagcctagacgtgcatcagtagatgaatagataatgaaaatctggtatgcatatgtaacggactagtacgcagctgctactaagaagatcaaagaactttcctgggaaaggggtggatttggaaagagtaatattactccaaggggactctgtaacataaataaataaataaataaataaataaataaaataatataaaagacagaaccagcatattttctgtcctatgaaaactctcatctgtaacgtgtgcatgtgggtgcagggtagataacacctttctagacatttaggaaaagcctaagtatctaggaagcagacagagagagaggtgatgaggaagtgtggggataagcataggaaaagagccagggggtggggctccaagggagtaactgagcagcaggagggggaggatgtggcgattaggaagccagggaaggaaacccttaaaaacatttcctttaaaagtgtcataaaggtctcaaacatatttaaatgggaactaaaaatacagaaacataaaagagagaaagatgggggtcaagggaatgagttatatttgtgtccaggaacggctactccggtgatgtccattggcgggggcggggatcagggcggggcatgaccctttattcttttccccctgtttgttcttcaaggccagtgcctgtgctggcaatccggagttcccaatcctgtgtgctgagaagcaatgcattcaagagcccggaaaagtctttggtaggagatcctgggtcccacagatagtgtggttttctcttctgctttccctggggaggaggctgaagggaagagcaagtgagtgaggattagggtcgggggtgggggctacaaggcatgccagggaaacccaggagtgtgggcgattgtgagagtaatcccaccatgtaaatgtgccatatttgggtggataacctcggcatgcatggggagaaaggctctaagggtgcagatgcccaggttggccccattacgcactatgaggggcctatataaggcagtcattgaaaagacggggtcctgaagccgtgggccattttgagctctgatgcttatcagaggtgagggtctgtgccaaggtccttaacctccaggggcctcattttgtcctctagaaaagagaagataaaataacctcactgggatgtttcgaggatgcagtgggttaatatgttgggagcatgtacatcaatggctggctgagtacatattgggcatcgcctaacatgtttgatggttggcgctgggaagcagggggcgtggcctcttgtgagcgtggcccccttgtggacgtgtcccttggtgggcgtggccccctggtgggcgtggccccggtgggcggggcatggttctaaattctctcagcatcctaaggcctgcctagctcctcagatgttcatcccaggcagctctgcctctctgcctttgtcccagcccccttcccttcctcctcacagactttactcattcccccttatacatcccctggcactctgcctgtgctgcgtggtttcctgctggatgaggtgtgtctctgttcactatgaccatccaatgaaccatatccgtgaagtggtatcctgttctcatgcccctccctgcttattgaccatccacatagtgggttcttgtctgctagcttcctataggtcaagtgtggctagacagctagggagttgagctgatgagtcccgtgactttgagttcaaatcttgattaacaaccaccttctggatatgtggtacaaagaagccacccatcttctctgagcttcgacctctgcgacagagatgggattgaacactttgctaggggttcacagggtgcccagcatttctatcgtcattgttcataatgagacagtcattctggggtcactgtgacacaggtaatgattgcatcaggacaatccccactccccaccccctccgtagtagcatcgtctcaagttagctgggatcaccgagtgtaaatgttaattaacaatttagttgaaccctaaggaatagttcagcatctcatattgctcctctctgaataaaaagacacgtgtggggtgtgggcatgccaactcttccgatcctgtttgtgcgtgcatataagcacgaggagaatgaattgacaaccctcccatttgcagagagtgagctctagctcatgccggtgacctgtgcaggtaggtgaagtgtcaagaggcagaattgcctaggttagggccacctctctgctgtcaccgggtgtgaggagttgggaagcagggcagaagtgtgtgggtgtgggtgtgggggcgggggcaggggatcctgttggatgtctcaggtagtaagtgttttgatcacgggtgagttcaagtccaggtcacttgagcctcagccagcagaggaggaagcaccaggttgagtttgaggtccttctcaaagaggagacgacacggggacacggggaaggagtgtgactcaccagagatgacagaggccaaagtgcagggagatattctttcctgtaagttccctggaggcattttggtctttcagtaaaagcaattttttttttcaaagcctgaaaagtccctttcttatttgttctaaactctggacgaagccaggtaaagcagttctgtccactggcttcacagtcctcctcctccgtctcgggacgctgtgggcttctggatgtgcttttcctgtattgcaatacttctctgcctcctctgtcttgctggttgctgatatggttaagtccatttcacgcatgtggaaactgaggtctagagcgactgggcaagttttcagtcatagggagagagggtggcataggcaacaggttttttttttttctttccttaaacggcaggatactgggtaatgtctatttatcgttggtgtgacggtttgaatatgcttggcccagggagcggcactataaggaggtgcagccttgtgggagtgggtgtggccttgtgggagtgggtgtgtcactgtgggcatgggctttaagaccctcattctagctgcccaaaagctagtcttctagcagccttcagatgaagatgtagaactctcagctcctcctgcaccatgcctgcctggatactgccatgttcccaccttgatgataatggactgaacctctgaacctgtaagccagccctaattaaatgttgtccttataagagctgccttggtcatggtgtctgttcccagcagtaaaaccctaaagctgttagtattgtgttagtttatacatccagtggctttgtgggtggattggggtggaagtggtggtttattgaaactgtaagtaacttgaggagaacagaactggttggttccccctccagtgtggcttccagccatctatactctgcagccttcctgactccaggattctgaagcagccctactgtgtacagccaccttctgtacttggatttattcaaggagatggataccctctcttctcttagggagctgattgtcatttgaggtcatcgtgagcaaggtgaggtgaggaaacattgtggtcatagacaccagcaagcgtgtggtcattggaggctatagaagatgaagtaacttctgttgtggaatgtgaaaacccctggttgtctgttatctgtttacttcctccttgccccttgctgtatgagtcactagaggccccaagacaattatacatatgcttaagaacacataatagggtttgataggggaattagccaaggtggtcttgctccaaagcctgggttcttagtattacactaagttcactttaatgcgacctctgtccgtccagcgacctctgtctgtccatttgctcattccttcatgagccttccagactttgcattttcttgctctcccctatagaacttaccaagtccagtttgtgtcacccatatgtaaatgtgtgagatttctcttggaatgtggtcaattaatggggtggggaggggacatggggcggcatccttagagaaaacccagctcccttccccagaagccaccagcgactggggaaggctcaggggagacttgtgaccacctccctccatgccggactgttgaccggcttattcttatgcaagtattgtatacgcagctaaagctgctctgagttcataagtgtagtggtcctgtcgtgtccagaggacactgtttctctcaatttcttctccaacttctgcctctttcttctgcccgccccccttcctcaatgatacttgagccttggggagaggaagtgtgatagagatgtctcattgagagccaggctgtctgtagacatgtatttatcgtgctttgaccagtcaccactggcaaaaacaagtccatatgtataacaagggcgaaaggctagtaaacttaggtcaccgtgagatgagtcccaggtaacggcacttgccaccaaacctgatgactcaagtttggtccctgggtctcacatggagaagaggagttaattcctgtaagctatcttctgatctctacaagttcacagtggcatatgcacccccatatacatagtaaatctttaaattgttaaataaaaatgacccttcgcttagataaatcagccattcgcacagacccagcattaccttgggtgtctttgtccttggaatctaagggaacatgtttctacatagtagcacatggcttagacatgaacagtaggctcacacctacctctactgtaccctggcttgtgctcctgggcaagtcccctcatgctcagtgtcctggttgtttttttgtttttttggttttttggttttttggttttttgttttttgtcaacttgacacatacctagacatatctagaaagaaggcatcttagttgagaaaatgcctccataaaattggactataggcaaatctgtagggcattttcttgattaataattggggtgtgttgggagggcccagcccactacgggtggtaccagcactgggcggatgagtgtgtgttgtatagggaagcaagctgggggagccctggaaaacaaaactgctgtcaataaacagcattccatcatggcctctgcttcagttcccgccttgagttcgtgcactgacttcccacagtgatggagtgtggcctgagagctgtcttctgaaataaaccatttctttcccaagttgtgatgtttttaatcacgcagtagaaacactagctaatgtgcacagttttggttgtgatgtttttattttttatttttttattatttttttttttttttttttggtttttttgagacagggtttctctgtgtagccctggctgtcctggaactcactttgtagaccaggctggcctcaaactcagaaatccgcctgcctctgcctcccgagtgctgggattaaaggcgtgcgccaccaccgcccggcttcccacagtgatggagtgtggcctgagagctgtcttctgaaataaaccatttctttcccaagttgtgatgtttttaatcacgcagtagaaacactagctaatgtgcacagttttggttgtgatgtttttaatcacagcaatagaaatactagctaatgtgcacagtaccatcacctgtcacatgggagaatgaccgcacctcccatgcagtatgcctggcacctcgtagcctagcaacaaatgctggacccctctctgcctccatgttgcattcctgcatggcctgggggaggtgggaggctgcatcggggagaacccagttttattgttgcaaatccattttgtccggtgcgaagggttcctgcagctgagatggttggcctcacatagcccttgagagacaaagttcagagtgagaattgttccagcccaggtcttccctccccagccctgggacttgcgtgacttaatctctctgtgagtctctctgtaaagctctgccctcactgtaaagcagaggcggagaagatgcttgcttgttgggatgtctggggaacgtggtctcaggccgtccttcagtacagtgtctgcctcagaaacacagtgtgcgtaatggaagctatacattagatttattatgcaaagactggagaaatggctcaacagtcaagagcatctactgctctttgcagaggacctgagtaagtttggttcttaaaactctggtccttgccacctgagactccatccccaggggatccgacaccctctgatggcctctgcctgtgctctacacatgcactgacccaccctaacagactaactacgcgttaatataaaaaccttcttaagagatttattatataaaaataacaatggtatcacaaagataagttagtatgccatctgtagtattgcttaattaatattgcttacttttgtaagagtagaaacctttgtcagaaagggttttcaaagtcagagtccactctgcagccctggaactaagaatctctagagaaggcttggagtcgtgtgatttcaacaagagtgtgggtgctcccagtggggtatagtctggagagccaccatgaacatgatcatgatcgtgatgttttaattttgagagggagggtcagggctgcagagtcaaatccagggcctcttgtctgcgaggcaggcatgctgcagctaagctaaaacctggggccttaagctgagctccagaacaagccagctcccttcatagcactcttgggagtattgcattcttttttgcctgagattgactggaacaagaacccttacccaaaatgacaagcaccagcgcctcagggtagcgaaggctggcccatttatttatttttatgacctcatgaagtcggtcagcaacccagataaagtgccgtgtgggttctgcaggagtactgggggaggttttgtatacctgagcacaaggctttccttgaacaccgagtaaccagttaggcacaatcttacatgtcacctgtcactttatacttgtctattgctcagcagaaatcgcagatggcttcccctctatgtgtcacattcttgtctgtctgaaagcccttcaagtacacagcacatctgcaggctataagcaagcttgactgttaatgaattcgtttccactctgaatttctaggttggatgttggcagccagactggcagatgtttagcggggactctgaggtctgtctgcccatctgtagccggacctcagacagcttggggcccctttggaaaatgatccttgggtcccacgtcttctcaccctcttcgtcttgcatccccaggttgaaaggattgtggacaagaggaagaacaagaaggggaaatgggaatatcttatccgatggaaaggctacggcagcacggaggacacgtgggaaccggagcatcacctcctgcactgtgaggagtttatcgacgagttcaacgggctccacttgtccaaggataagagggtgaagtcagggaagcaggccggagcctccaagctcctccgcgacgcccgcggcctgccagtggaaagactctcccatcggcctctggaacccgggaagagcaaaccatcttcccacaagcggaagcgcgtcaactctcccctgtccaggcccaagaaggggtcttcgggtaaggctccagacagggccaccaagactgtgtcctataggactacccccagtggcttacagatcatgcccctgaagaaggctcagaacggcctggagaacggagatgccggctctgagaaggacgagtcacactttggaaacgggtcccatcagccggatctggagttgaacgaccagcttggagagcaggaggccagtgactgcgacgggacccactccgcgctggtggagaatggagttggtctgtggcttttctttctctcagggttgggttggtcttggctggtggccagcttgtggtgttgttgttgttgttgttgttgttgtaggcaggatcttatgtggtccaggttggcctcaaactcaccaagtattctaggatggctttgacccccctgtctcctgcctctgtctcctgggtgctgggattgcatgcaggcactgttagatcctgtctcaggtaaaggtggaacacggggcatgctgggtaaggactctactcaccaagccagccatgtcttcagccctttggtctgacttttctttcaacctagggaaatatctaagttgctacccaccttctgtctttaactcttagctacctcttagttctgcctttcttggtctctcacgtcaaggccacggacgtttgacctcaagcctgtgctggttattagacacctttgcatacagggatatcaagccccaggtgctatatgaggcctgcggtaggttacaaaggcctaactacagctaggcctgtcatcccagctatgtgagaggctggggtaggaggattgcaaatgtaaggtcactcgggactacaggttgagtgcatgaccagcttgggccactgtaatgagatcctgtgatgtaaaggggacatccaatcccccctatactgttaaatacagaaaaaagagagaatcctactacactgtaggataccccaggctgtagtcaccacaccagatccacattcctgggggtggggtgcagcccaacatcccaggagacagaagtcctccccagagggcctgcacctcccctgggactcacagcctttgtccagggaggggctgccttgggggctgtcctcctgtccacgccatttacagatggagttctccaagctagcgcatgatgggagatgcctgctcttctggtgtcaccagcgtaggcggagggccgttcctcttaggtggaacatgactaacttccagctgtgtccatgcatgggacataggacagtacaactcctgtcgtgcttctttaatttctttatccagtctctatgttcagaccaggcttgccctggactcacggttgcccagactgggcagagcttcctttataaagccgccaatccctttcaagatgatagatacagttctcatgagcttatctcatcccacaggctttgcctcttggtactgttaaatgggatacagagtttcaagctgtgactctcgggggagggggaaccccaacacccagactatagtgggttggtcctaactgcagctccaaccccgccctgtgccggctctcttgcctgctcctttctgccctgtcctggaagcaacgtagactgtaggtagcttgcgttaggacatgaattcctcctcttacagtctctggaggcggtgaaccctgagcttctcatgctgtgacatcctcagtggccagactgcgccttcacaaagacctcagtggcctgtgtctttgggcaagctgtgtgctccagtgtcatgccccctccattctcaaacacccttgtgtatacccacaggcatcttcatatacagagatcagagcctgaagtctcaggagcttcaggaaatacctaatgggcacacaacagtgcatgcccagtgtgcagggccctcagatgcccctgatggaatgagagtgaacacggatgcagaggtgcaggtggtaacgagcaggctaggtcatgagttaagtgcccgtctgtgatgatgctgagtgtggggtctggaccgttctgagtatgctccgttggggagagcttgccatctttaggggaacctgggcaattgcttagagcttcctcctgctccagagaggaatctcaccctaacgcgatttatttaggcatctgccccagcctgactcatgcttccatctggggatcccccagtgctgatatgcctgtgcttcgagcatatggaagcgctgtttgtcttaaacattcatctctcgggggaagaagtagcttgtgtaaacgaggcttggcataaacatccccgtttgatgttcgcgtgacagctgctagcagttgcagaatccccctcccccattggtgcaggaaggggcggtcaggggaagcctcttaggctcatggggtacaagagcaggagcctgggcagggtcccagtaactgagctgataacactccccctgccagacttgcagcttccctaagagtaagcaggagcactaagggaggatggtttgctgactgactgccagacagcagtgtgatgcacagggtgggtgtctctccccatgccctgtgctgctttctgaggtggagtgcaactgttagccttttgctctggcgacccgccttgaatgccaactcgctaatggggccagatacctcatcacctgagaaacttgctagccagccgacccgccgaagtccctgcgcgtttgtagctattctggacctttttcctcctcagtctggtgtcttgctatcttctccagataatgtatattcacacatcccagggccccagctggaagggagaggaagctgccacccacctctattgtgtttgtagccgtcccaaactttttgcttaattacatcctttcgagttggcgcccacaagctcccatgaggataggctgttggtctcatatttcacgtgtctaatatccccctggatacctgtgacaaatgtaggcagatcccacagtatctgatggactgtcttaggcggagaggctccaggagactggctcttgatgggtacctcggcggcttctgtgtgttagactctgtaccaggatgactgggccgtgtcatttgccatcggacaccagagcccttcagttcaagtctgactctcggagcaccggttcaggaccactgccctgctagccgctggctagattagagagatgcaaagagaggagtaagggcccatcttttgtaacttaaaatctaccctcggccaagctggtgggctcggacttttaggttgagtaagcaccagaggttgaacctccatggatggagtcccatgtaatacatggaacagcattgccgtatttatatacaactcgaatgtagtcactcgtgggagaaacggctcctgcctcagtcaccctctgacacttgggttgcagctagcttattacccaggggggtcaagcactgggggaagcggaggcagcatccttgccattgagagcagtctgagattcagaggtgtagggagaccaaacaagtctctgtcatgctcctggccttagggaagctctgttgagggcagtgccacatacaggttaggcattgaattattttcctcctaatctttctctgacccaaacctaaggatctagtgccatttgaccagtggggtgtaggacttaggggttccccctgtttgccctgcagaagcatcccagagggctcctgactgcacctcagggcagtgtttgggatatggggtgttcactttttaaatgtctttccccccctctctcgatgacttaacttccccatagaaagaagtaacttatgtaatatgacttccttatggtataggaacaatccacagcccagggctccagtgggtggcacattctgggttcacaccatgcctctccccgctgaagctcaagatgaatatggcatgcatggctcagtgcccacctctgttccctcttctcctggggtgacaaacgactctgcggtccacggaccatctgcctcagtatccctctgggagcttgttagaatgagctccgccccatccgagtgaatggggacctggggcggcggcgggggggggggcgggggggcaggtgtgaatcactcctgtcaaacgatgagttttaatagctgagtgtggatggccgcccccacggacgtgtgtggttgtgagcgatggctcatagacgcctcgctgccagatctgggatgttctcccgcatttttaaacttgtaagagcatggtttttttaaaaaacaaggtctcttccttgactgtgtacttcccacataagggatttctctctgtttctgtctgtctgtctgtctgtctgtctctgcctctctgtctccatgtctctttcttaagaaagataggcttcagctgtgctgagcagctgtccctttagggatccctccctctcctgctctggtgggaactcccctgtcctgactgtccacagaggccacagcctggttcttttaaagacccatttgtgctttaacccctggggacactccacctccccagcaggtaccctcattccctttgagccctagagcaaagcatggctgcccagtcagtgctctccaagggcccgtggaccctcaagccccgtgcccacagttctctgatttccgaatatcatttctctacatgtttggtgtctgtctgtctgtctcccaggccttccgtgattcactattccctgcattgttcccgcccatgcatgtcccctcccagacaggtgggcatcctttgccattttccatccatccatcctctgacaggatgccagccttctcttccagggtgttcacttcaaccttcacactctccatgcggttattgctttcccttatctgcagatcagaaccgaggtggacatttaaaaagcaacccacactgtcctcgtggggagaacttgggacctgacaaaggcagagctagactcagcacacctggagggtgggctggaaactgaacagagccaagttggtactgttggcctaggaaccccattttggaaaccaccaccattgactaataagctgtgggtggtaggtgaaaacataggcggttgtgagagcccaggggcctcgccgaagagtaggcgttcttatgcctgggaccttccagttgcctttgtgactcgttgaagtatgagggagaacgtggaatgggagaagcagggtaaaggagctatattgtgagattctgatgttcgcaaaggatgctctgtggtcctcgtggtggcttctagaggcagctgttacacccatattaaagtgcaggaggaggctacagatggcacaggttgggctcaggagacaagcccaggcaatttaaccccagagctgacctcgaagtaatacccacctggctttgggggcagcgaaaagcaatttgtaaaccctgattacccacaaacataactggggtgttcttctctgacttgaatctgcaaacctttgataagattaagttcacaaaaagtacaacttaaggatggttgttagagtgcttgcctgatgtgtgaagtcttgggtcagagcctcaggtgctgcatgcctataattgtgatgctctgagtgtggagcccgggggtcagaaattcaagataatccttggctacctagcaagttcagggacagcctgaacttgagtctttctctctttccctccctccctccttttttcatccctccttcctttatcccctgctctctttcctctttcctgccctcccttcctctctctctccccctcttcctccaacacaaagtaaaataaatataacttaagactgaacttactcttagaaagctccagcaggagcctgaggctgagtggtcagttctatgttccagaatggataatgtaaatgaggattctagagcgagtgggcgggctgggctgcccctgactcatgcagactctgcagactcttggaccagagaacacattccaggtttctctggtgggtctcagacagggtggatttccagactggtcagggagacaaaggaaaattgtcagttggtctcactctgagcccagtggtcagtcgtcgtcctcagtgaccctctggcttctctcagtcccctcagtactgcctcaaaactgttctagacatttcttactccctgctttgatcttgaaacctggctctctcagccactattgcttcccagagcattggttttgtcctgaaagaggcacagggtcatctgatgtaggatgactttgggtatcttgagtgacagccctcaacctgcctgtgaaacctggcccacggctgttctttttgcttttgtccagtgccagctacctatgcaaaaccagcaccgaccaggccttttggtgttcagaggtggggagttttcaaagccagtagtacaagggcttaagggctttatgctttgcccttcgatgtgtggcaagtaactggtgctaatggatgcatttaagccctttgtgctgtgaagctaaattctggtctaagttagccactgcactctacagagggtgccgggctagaatggaaaaatctaaagctctctaagtaggagcaaccaaaccgctggcaaacccaagagggaaattgactttctccagttaggtcatggcctagattttttttttcaagtttgtttattttaattgcattcattcatctaactatctattgtctgtctctctgtctgtctgtctgtctagccagtcactcagtctctttgtatatgcaccaatctctgtctctctgtctttactgtgtgtgtgtgtgtgtgtgtggtgtgtgtgtggtatgtgtgtttgtgtgtggtgtgtgatgtgtgtgtgatgtgtgtgtatgtggggtgtgtgatgtgtgtgtgatgtgtgtgtgtgtggtgtgtgtgtgtgtgtggtgtgtgtgatgtgtggtgtgtgatgtgtgtgtgtgtgatgtgtggtgtgtgtgtgtgtggttgtgtgtgtgtgtgtnnnnnnnnnnnnnnnnnnnnnnnnnnnnnnnnnnnnnnnnnnnnnnnnnnnnnnnnnnnnnnnnnnnnnnnnnnnnnnnnnnnnnnnnnnnnnnnnnnnnnnnnnnnnnnnnnnnnnnnnnnnnnnnnnnnnnnnnnnnnnnnnnnnnnnnnnnnnnnnnnnnnnnnnnnnnnnnnnnnnnnnnnnnnnnnnnnnnnnnnnnnnnnnnnnnnnnnnnnnnnnnnnnnnnnnnnnnnnnnnnnnnnnnnnnnnnnnnnnnnnnnnnnnnnnnnnnnnnnnnnnnnnnnnnnnnnnnnnnnnnnnnnnnnnnnnnnnnnnnnnnnnnnnnnnnnnnnnnnnnnnnnnnnnnnnnnnnnnnnnnnnnnnnnnnnnnnnnnnnnnnnnnnnnnnnnnnnnnnnnnnnnnnnnnnnnnnnnnnnnnnnnnnnnnnnnnnnnnnnnnnnnnnnnnnnnnnnnnnnnnnnnnnnnnnnnnnnnnnnnnnnnnnnnnnnnnnnnnnnnnnnnnnnnnnnnnnnnnnnnnnnnnnnnnnnnnnnnnnnnnnnnnnnnnnnnnnnnnnnnnnnnnnnnnnnnnnnnnnnnnnnnnnnnnnnnnnnnnnnnnnnnnnnnnnnnnnnnnnnnnnnnnnnnnnnnnnnnnnnnnnnnnnnnnnnnnnnnnnnnnnnnnnnnnnnnnnnnnnnnnnnnnnnnnnnnnnnnnnnnnnnnnnnnnnnnnnnnnnnnnnnnnnnnnnnnnnnnnnnnnnnnnnnnnnnnnnnnnnnnnnnnnnnnnnnnnnnnnnnnnnnnnnnnnnnnnnnnnnnnnnnnnnnnnnnnnnnnnnnnnnnnnnnnnnnnnnnnnnnnnnnnnnnnnnnnnnnnnnnnnnnnnnnnnnnnnnnnnnnnnnnnnnnnnnnnnnnnnnnnnnnnnnnnnnnnnnnnnnnnnnnnntccctccctccctccctccctccctccctatctatcatctatttactctgttagcttcagctgtcagcttgacacaaacctagaatcatctgagaagagggacctccaaccgaagatctgcctggctctggttggcccatggctatgcctgtgggacatttttcttaattgctaattggtgtaggaggacccagccccactgtgggtagtaccatcccttggcaggtgggcctaggctgtatataaaacttagttaagcaacatacaggaaccatgccagcaagcagcttggtcctccatggtctctgcttcagttcctgacttctggtttctccttaagttcctgccttgcctgcctttgatgatggactcttgacatgtaagccagataaacctgtttcttccccaaggtgctgttggccagcattttattacagcaactaggaagtaaaccgggactcatccatccatccatccatccatccatccatccatcatcttcaagacttcctgacgtgacatctcagtagtgaccggaggtagcagttggacctgtacctgttctatcactggcttcctcctaaactctgagtcagtcctgtccccctttctgggcaaggacatgtaaatctactctgctttttagccacagaggttcttacagcatgcagggacttaactgtctctcttcgatgacacacaggctgctgcagggtacatactcttgccaaccctggccacagccaatctgttttggtcttccaaacttggttgtttaattttagtttgtcggcccgagtgtatgttctctgtgctcccaagtgtctggccccaggaactgcccaggcacgggcatatgccaacacagaggatgctgggcagtcagccatctatgtgccgcctcagatagattgtcttgcttctctgggaatcactgatgaaatacattcatgcttcataagtcggggcaaaaaaattaattgaattaataatttatagagccattagaataccacctgccgtgtgatagatgtttgatgatagctaactcttcctttttgtaatgttctatttttttcctattttgatctttgcattttcctctttagtaattattttatataccatgtagactgactccttaacacatatattattaagctagcaaatacacgttgagtgtgtgctctcttagacacacaatggtggcactaaggggaacctggggaagaaaccgttgggagaagtgacatcagagccagcgtaggggaagaggcctcttggaggaggtgatatgtgagctgaagatggctgaatgagggagggagaagctgaggatggctggagatcctgacagtgtgacaagggctcggaccaaggactagtgttggatgagggagtctgtgtagtcagcactggtttaaagactctctctgtagacctccctgtctctgctttctgcatgtgtgggtccccctgcttcctaaataccagccctctttagcatagtagctgccgttcattccacaggcacctctcccacagggagtgactcccatgggaaccttccctgactcccagcctggatcagtgctcatttatctgtgcgcccagacctcagtttcttcactgacaacgtgcgcctcctcttgcagtgcccatagctcggttatttccttattgatcactctttcgtcagtgagccccaatgcatgagaacagcaagttaatggaagaaggatggctcatgatttcagagggttcagtctgggatggttgtccctatgtacttgggtaaacacatcaccatagcaacaagagtgcatggcagagaggatgtcttcacctcatgatggacaggaaactgcaggagtattggaggggctggggggatcaggtataaccttgaaaggtgtgcacctagtgacccacttctttcagttaagacctcagctccaaaagtttcaggaaccttccattcaacccaggagcctgttgggggaaatttcctagtcagaccaaatctgtttgtgtaattgtgtaattccatgctcagtaaaaatccccataagggtagcgtgatggccacttgtcttagagttggatctccaacaccttgcaatccacccccactgcccccagttagcaggcgatttcagaaacacagcagacactgaatgaaagtgggaaggacccaggagatgaaagaaaccctgaagccatctctgcttgctatgtgggtctgggagggccccgtcgccacgtatgccatgctagcatctgtcaaaactttccagcccttgtccccacacctttctccatctttgagtgtcccatatgctcatgggatacttcctacccatgatatcttatcagagatttaatgcagctaaacgctctctttcctttaactacagatgcttatgccatcttccacaccaaccctcctttgcccgttattcacttcgtcatggctggcttttcagaaggcatctgttgccttcaccacagtgggtatggtgtgcccttcccaacagagtgaatttccagttgtcatccgatttcctgtatagccctttgctatcgaagaaatgcaagccaaaatcaaaacctatgacctgtctgagtggcaaagcatgatgagaaactagtgggcttctaaatgagaagctcctggtgcacaaaagtctataagttctagaagatggcgagaaacactggagacagcgagagagagactgggaggctcagctgggagcttggaccttagagatcatgagttggatacagacagactcttccttcctccctccctccctccctccctccnnnnnnnnnnnnnnnnnnnntccctccctccctccctccctccctcattctccatcatcattgccctcctcatcctcctccctcccccctcctcttactattttgagtctactgtatcccagccttagacttactacgctatgtagctgaacatgaccttgaaatcccgacccgcctgcctctgcttcccaagtggtaagattaacaccataccttgtttatgcagaaccagggattgagccctgagtcctggctggcctgagctccgaaggtttcccagagctccgacagataaagaggagagagaagattgcactggatggcagacatgatactttattcacatttgtggaaagtaagccacatggagctcaaatcccatcaatacgttccactttatcttaaataaagcattctttaagggactgttctgggccgggcagcatgcagctggctgccgcgtggcccttctgagactgtagtgatggatacggtggggtgttccaagttcagggaagaaagcaagcaacgaggaagcagcaagtcaggagacagtgtccgtgtccagatactaccgagcccagcctgagagccgttccctgtgcgggtcccagcagatgtgcaggcagtacccactgctcctcccatttacaaggcagggagactgaggccagagcaggtggacggaaaaggcttctctggccaaagggacaactgaagtgatgtctgagggtcaggacatgttgtctgagaacctcaaatagtccacataaggggcaggcgtggaaagcaaaactagagacgagcctatgagttttctgttggagcaggagggccggggagtctcagaggtcgtcataaacattgaacactttagggaccatgttatcaggggccaagcttctggtacagcaacacttacggagagagccttgggggcttgacatgggagaaatgatttgagctatagatgtagttcctttgcagaggggaggggaggagttggagctggaaaccctccctaagtgctccgcccaccacaccgtactatggtatcaggctttttaatgaagccatgtgcattttgaattcatgctttgccgggtggctaaggtgtttagacacctgacagcaaacaccccaccgatgtatataatcatggtgccctgcatttctaaataatctcaggcctcagcttcctccacatccgccatagacctcttcaggcataattacagctcgtcaggtgacagctgccatgagtgagaggattttaatgtacccgtggatttgagtgctgcagtttgcttggaccttgatatcagagatttgcatgtggagacagttaggagtccagtgtcatgagcaacagtaaggtcatgttccaagcacagggctgtgggtgcacattgaactctctggccccacacctagaactcccaggatatggtgggtggagccatccaagggagtttccagcttcagctcctcccccttcgccatctcctctctggttccttcccctcctctccatggcctcctgcaaagacctgctgctggcccccaggacaccgaaaaagccgccaaggctgcattgggtcctgatgtaatttctcaacaagatcttgacccctctgactttactccttttcttccacaactcctcagcacagcccactatcttcaacaagtctccccagggtcagccacagacccggaactactttcccctgcgactccttcacccccagggcagtggctttgttcagctatgggagcacatgggtctttttgcttctcagactgcaccctctccatcccttgcttgccccagttcatcaccaaagacgatcaggttgcagctagccctggtcaggtgctctctcctcctcactctgaattgtatctgtttcctgaggtgatgatggaggaagggaggataggaaggagccatccttgtgctgccatccttatatgtggccagaagagacacactgcatgtagttctcgtctctcgtgctctctgttccccttgtgtgtgcatgtatggccatgcatgcctgtagaagctagaagctgacatcaggaatcttcctcaggcattccctcttatttttcccccctgaggcaaggcctctcactgaaccttaaattgggctatgctgattggccagtaggccccagggatcctcccgcctctgcagccccagtgttaggatcacagacatgcaccaccacgctcaacttgttaagtgggtatgggtgatctgaactggagtcctcatggtcgctaggcaagcactttaccaatttgctatctcctagtccccttcccctctcttctaagaggtagaagcttcctcgggcctccagttgcaccccaacattagtttatttaccagtcaaatatttatgcccttctcttttctgggctctgctgtttctgaaaatgtgggttacctatggtagctcttgcctttaggacgtcatctgggggcaagcaggcagtcagacactcaaaagagctatgtcaagatatagacagtgtacatgaagattttgtccagcagggtagcctccagacatatctgtctgcagttaagttgcaatcaattagaattaaagaatttaattttattttcaatgaactattgaccagcagctgccatgttgaatcagcaggttgggtagatccgtcattgcagggtggatgaacagaatccaactggaggctccagagggcaggttcttgtctgccccatgtccatcagtgaccctcgggtgccaagaatagtacaggagcttattaagcatgtgctgaatatagaaggaggacaatgtagcacaggctatgaaagcaagatggataaactggttaaagagggacatgcaacatgaatgtcactgtggagccccagagagatgggatctctaacagctgcaggtagacagcgtgctccacagactttctatcctctcttcgtggcttctttcaatgtcacaatggctggaaccccacaatgtgctgctgtcatttacacaaaggaaggaaggtgggtagcatccacaccacaccttgctgtctcttcagatacctggaagaggtaagatctcaattggctcgtgggaggcggagagccaggtgtggcttaattgtgagtgaccaggttgaggaaccgacctggttgtaaacaacacacgtctgttttgacatttggaaatgagacttgtgtttcatgaggctggactttgtgatcagtgagagaggccaatgtggtgtgtggccgtcaggaacggtgttgctttatgagtttggccctggtggtggtttgggaattgctcaagttggttttctgggcttgctagtgaaacagcctctatgtgtgtcttttgtgccattggaggtttagttccatgtcaatttctagaagtggatttgagagtgggtacagaaccagttttgtcagagaatccatctcctttcataatgacgattcctctcatatcccctccctaaagtaaagggaaatcccaactcccatgattctctgcagcatggaatattatccacgtggtgagtttccaccaagctaaggggaaagaagtgaatgatatttcaatgctgttttaatttttacctcccactttacgaattataatttgtgttgttcttcagagcaaaagtcttttcctacataaatgctaactctgtcttttgttcgttttgttcccagacagtgtcttctttcctctattctcagcatttcaaagctctttacaacttggaggtattactagtcctttacctatgacacgcacatatttgacacatgccttttaattggctcattgttctgcttactgggccatctgtgtctcttctgcctttgctgaagttttctagttcattttaagtgtgcgtttttcttgtatttctcacttggagcctttgatatattactgtcttaaaggccttgtcagattgtttcaggataatgagtttacacttggtctaattcttgtttcctgcctgaactctggaattttgggtgctggctcatttgggcagggagggttgcatttgcttgtttttgtttttgttttgttttttcctttcctttttccttgacaccccacccccacccctcgccccagatctctactcattctgtctttgcccccagctggtgcagagttctcacaaaacagcctatctgtttgctaccgtcctttagccttccttcctgaggttggggagggtgccttactccctgcctagctggtggccctgagactgaggtcccttctcccatcttgcagagaagagtttgtgtcctcctgctgggaagaggccccttcccaaggttcccttctctgagccctgcttgagtcctgctccactctccctctggctttcctgcttctcttactcaagagataatcatgtttgtgaacccagcttcatctttctggattttctttttgtgttttctctgccatgtctctgcattcagtgcaggggtatttgtcccagtttacccagctgtcttaatgggaaacattccttcatatttcaaaaaagcttggtgggaccagacaggaggaagctagtgtggtgggagttccctctattcaatacatacccagagtgggcatcacttcctgacctcacagtcctatgaggcaggggcggtgccacccatttcctttgagtggtagtaaaggcacacagcaggtgagtatgcaatgcagatgaagaagcaggtgagcaggcaggtgaagaagcaggtgagtatgcaggtgagcatgcaggtgagcaagcaggtgagtatgcaggtgagcaagcaggtgagtatgcaagtgaggaagcaggtaagcaggcaggtgaagaagcaggtgaggaagcaggcgaggaagcaggcgaggaagcaggtgagcatgcaggtgaagaagcaggtgaggaagcaggtgaagaagcaggtgagcaggcaggtgaggaagcaggtgagcaggcaggtgaggaagcaggtgggcaggcaggtgaggaagcaggtgaggaagcaggtgagcaagcaggtgagcaagcaggtgagcatgtgggtgaagaagcagttgagcaggcaggtgaggaagcaggcgaggaagcaggtgagcaggcaggtgagcatgcaggtgaagaagcaggtgagaaagcaggcaaggaagcaggtgaggaagcagatgagcatgcaggtcaagaagcaggtgagcaggcaggtgaggaagcaggcgaggaagcaggtgagcaggcaggtgagcctgcaggtgaagaagcaggtgagcatgaaggtgaagaagcaggtgagcaggcaggtgaagcaggtgagcaggcaggtgagcaggcaggtgagcatgcaggtgagcatgcaggtgaagcagcaggcgaggaagcaggtgagcaggcaggtgagcgtgcaggtgaagaagcaggtaagcatgcaggtgagcatgcaggtgagcatgcaggtgagcaagcaggtgagcaagcaggtgcagaagcaggtgagctcactgtccagtcttgtattcctgagaggttgggtggggttaagcaagtggtgacttcccttgtttgccaggctcagcagggtggatcctgccccgtggcttcagcctggtatggagtggacacgggagggggaaggtgtgatattgaggacttagctgctccttcctttgctgtgaacatcttggtgcatctgaaggttaattttgattgtcagttagttggacaagtgtctgcatcagcactgaggctcatgtccagagaggtctcactggggtgggtggcattttcatttgacctggtggcctagaatgactaaaaagaggataaaggacgaagcagttgagtgctgctgtgttccttaccccagttcctgatctactaccatgtgagcagccttccacttccagactgcggctggctggctgatatgccttgtcttctacaatggaacgatactttgtttcatttacctcctggaaaaatttcttccttttaagttcctgatgtatgctcgcatgtatgtatgctttatttatgtatgccttatatatgtgtgggcgtgcacatacatgcatgttcatgtccatatggaagacaggatgttatttctcaggaactgtttcccttgttttatgagtcagggtctcttactgggacctggaacttgctggttaggctaatgtgggtttgtgtgattgaactcaggtttttgtgtttgtgggtgggaagaagtgtgcactatgcatttggtcataggaaggagaacaataatgaatatggtagcctccagctaagaggagggaagagcttagactgtcctggccacgttggtgtttgcgccttcatttacagttaagaataatcctggagactgtccgtctctttacattcatccgaggaacaggagccagatggtcctgtagcatttccccagttaccctccggcttgacctatccctgccgtcgaactgtggagccctgagcttccgagtatcccaaggctctttccctgcctgcttcttgccatctctctggagggagttgagacgctcaaaagcagttccttgaggtgaagactgaagggctagagtgagaaagcagcttcctacacatcttcagagtgggggaggtgcagaatgttacagccacagggacgtgtactaggtgctcgcaggggctcctgatccttcctgggtcaatggtgttgcgaattcccaaatcagcatcagccacgtgcatccagcttcatgaatgattggtcagcgccacctctaaacccaagctctagtaggggcgtggccttggattgggggcggggcggggcggggcgggggggggggacgacgcctgcatctccctgtatcgcatttcctgttaccttctgatcgacaattactgcaggcattgcctccaaatgaagcccaagagtaggaactttattcctctactttgaagccccatcactcccttgaacagctcacccacccctggttatattcagtaggaataagtgaagtaaaatgagcagccgctggccccaatccggcttccattatataaaatccgagttgtaactggcagcgggcttacctttatctgtaagatggacccacagttgccgctccacagaactattgagttaagtcagagccactcagaacagggtcatgggttgctaggaaacaggacaatgacatcccgcccttgctgttctagaagcatggacacagatgttcagtgtctatcttatctctgggtgggacctagagcccactgagtgcagcacccataccagaaccttttgttaccagcctggtgcaggatgtatggacagctgctgtagaaactgttgccatcttagatgtcaagtgtatgggagaaacagctagctccctgagtgccagtctcttaattaaatatccacgtacactttctgaagttcattaagcgaccgtgttggtgtccggagctctatctttgtatctgacaaaactgggttgctttgagtcatggaacattatcaaatgaggtggcttcacagaacctgcgggatgacaggtacttcctctgtgcctggctctactgatacccacagcatcccctgtgcccactgcccacatcctggggacccagcagagtcgctcctggtccatgcctttggattctagcttgagattccaagagtttttgataaaaaggctgagcagtgttgcttctcagccttttggctggagtcaaatggaaagtctgactgacatcatcgagagatagacttggagctctgggtgctgaggaacaaatcccaggggcttctaggcataccctccatgagacaggacgctacgaggaacaaatcccaggggcttctaggcatactctccatgagacaggacgctacggctgtcttgctgtcctcagagagtcaagactcagcaccagtattgccgggaaattttatcgctgagctgggctgcggtgatttactactttgagctatatgtatatgtgtatgtttgaatatgagtatgtgagtatgtacatatgtgggtgcaggtgctcatgaagtccagaagagggcaccctattccctggagctggagttacaggagacccagggtgctaagagtcagttctaggtcttctataagaactgtatatgttcttagctgttgagctgtctcttcacgctgacatagaatctttaaaaataagcttcacttttaatatagttttagaattacaggaaaattggaacagtaacagacagtctctatagccctatttggtctcacattatttcatatctcttagtatggtgcctggtcaaaatggatgaagccacatgtggcggtttgaataagtttggcccctatagattcatgtgtttcaatgcttggccataaggagaggcactattaggaggtgtggccttattgtagtaggtatggccttgttggaggaagcgtgtcactatgcaggtggacttcgaggtctcctatgcttaggctccgcacagtgtggatttagaacctcctgtctgcctgtagattaagatgtagaactcttggttcctccagcaccaagtctgcctataggctgccatacttatatcccaccatgaggataatggactgaacctctgaaactgtaagccaaccctaattaaataaatgttcacctttataagagttctcttggtcatggtgtctcttcatagcaataaacccccaactaagacaccatgttaacacataattaagaactaaaacccacactgtactcaggcttcctttgtttttttacctagagtgttatccaggatactgtgtctagtcattgtgggtctctttaggctccctgtggctgaggcagtctcacagacttcctttcattttagtgaccttctgaggttagagaggacaagatattctccaatagagtttgtttaatggcttttcatggacacactgggattgtatgttttgagagatagatctcagaggccaggtgtgtgtgtgtgtttcattgtcatatcacaccaaaaggccatgctgtgggtgtgacatacctctgctgatgttgattgctcaaaagaagtccccatgcctacctcacatctaagaaataaagttatattccattgtcttgaggttggagtatttttttaaatacttttccatgaaacaaaattatatcagttccccctttcatcccttcagccccttctagatactctttctcaaacctgtccaaagccctccccactcttaagttgacagtatcttttcctttgtttatatttgtgtaaacatgtgtgcatacacacacacatacacacacatgtgtacacacacacacatatcctgccaaagacaatagctatctatctacctgtgatatgcctgtccatccatccatccatccatccatccatccatccatccatcatccatccaccctgttgtttgtgtatatgtggtttcaagaatgaccactctacactgaactaccaactagagggctcattctcccggaagtcagtagttgcctgtagttctttgtctaagggttgaaactatcatgctgaaatgtccatcgattaccattattctactcttcttcatgcagtcatttctaggagagacagttttatagcaagcttgcttgtattcatgctctttcttacatttctgcctcatcttctgagatgcataagatttaaaacagtgactctcaaactaggtcgtgacccctttgggggttgaatgactttttcatgggggtcacctaagaccatcagaaaacacaggtatttatattataatttataacagtagtagaattacagttatgaagcaacgaaagtaatgttatgtctggggatcaccacaacatgaactgaagtaaagaatcccagcattaggaaggctgagaaccgctgatttagaatgcagtgaggaactatgctggtctggcaaagtgctgggagaagatccttctctaagttccacagcagagtattctgtctacatgtaggtacgtgcacgtgagtgcagtgcacatggaggccagcagagggtgccagatcctatggagttacaggcagtggctggccacaatggtcctctgccagagcagccagtgctcttagccactgagccacctctccagccctgacaggttggagcatttacattaaatatctggaattttacatggccggtgtgtgtgctctgcctttatctattcacattcattcacacccatgtcaactcatgggtggttcttatttttcataactgcaccatctgttgctcatattgtaattttggttatgaggtggggggggtggagtttccatctggttcctgtatcctctagacaaacccaatcactgttgggagctggtttcatttgagcactttgtcccattctgaccttgtaggctcatcctgggtgattcttggtatagtgctggagtcagagttcttgggaatccaggggtgctgcttgcttcctgccattgattagggtgccgctgattcctgcctccctcagtcacagtgagagagatatgcatgtatactaacctgtgtgtgcacacatgtgcacagacccttctgtaggcagtgtccatatttgcctgggatgttttgaaatctgagctatcaccttgggcgacttagaccctctgccttgccagtctctaagttccctgcccctctcacctgctgccccattgcctagttctatgcctggtgtgcacagcagtagaattgctgggccttccctggatgggaaccagctgttttctaagggtgtgcacaacctgtgtgttcttgtttcaattttcaggttcttcacctttctaaggctcccggggtctcggccttcagcaaggtgaattcttctatatttaacatctttagattccctttgaaattctgcatttcatcctgggatcccaggacctcctagtgagactctaaagtttgcatatttaaacttctctgtactgtgaagttctttgggttgggacaagtgcttgatgtcatccagcctcccttgtaccatacagaatcagactaaatgccacctctgcttcttttttgtcaccttcctcctgttcagatcggctggagaccactgatctactcaccgtcctcatcgcttccccttctctgggatgtgatttcaccggaatcatataatatatgagtggctcacagtcgcttcttttgctaagtaacgtgtttaaaactcactcttgtggcttagtaaccatgctggtgagtttcacccgtgaacttgactcaacctagaattactgtcaattaaggaactgtctagatcaggctggcccatctatgttggggttgttttgattattaattgtcagaggaagaccaggcccaccgtgggcagtaccgttccctggctttggaccttggaatgcgtgagagtagaaagacaagcaaacaagaagccttgcattcattttcctgctgctcttgacggtggacatgatactttaagttcctgccccgacttcccataattatggactgtaaccccggagctgtaagccaaagaaaccnnnnnnnnnnnnnnnnnnnntctaaggctcccggggtctcggccttcagcatggtgacttcttctatatttaacatctttagattccctttgaaattctgcatttcatcctgggatcccaggacctcctagtgagactctaaagtttgcatacttaaacttctctgtactgtgaagttctttgggttgggacaagtgcttgatgtcatccagcctccctggtaccatacagaatcagactaaatgccacctctgcttcttttttgtcaccttcctcctgttcagatccgctggagaccactgatctactcaccgtcctcatcgcttccccttctctgggatgtcatttaaccggaatcatataatatatgagtggctcacagtcgcttcttttgctaagtaacgtgtttaaaactcactcttgtggcttggtaaccatgctggtgagtttcacccctgaacttgaatcaacctagaattactatcaattaaggaactgtctagatcaggctggcccatctatgttggggttgtcttgattattaattgtcagaggaagaccaggcccaccgtgggcagtaccgttccctggcttggaatgcgtgagagtagaaagacaagcaaacaaggagccttgcatgcattctcctgctgctcttgatggtggacatgatactttaagttcctgccctgacttcccataattatggactgtaaccccggagctgtaagccaaagaaaccctttcttctccaaggtgcttctgttcagggtcatttgtcacagggacagggataaaatgagaacagctgctaatttatttttatcactgagtaatattccattctgtgggtgtatcatttcatttatccatttgcccacaaaagaataacatggttgcttccatgggcgtttgggggaaaacccacagctttgctcttttcatattgttgtgtagctgtaagatttccagatcgacttggcttagaaatacccggaaatggggaatcttcctctgctttgttttgctttttttaggtggtgaggagatgctcttcaggttcctcctccttagtgaggagccattggcaggtgcttgctgctgtgggagggagcatcccnnnnnnnnnnnnnnnnnnnnnnnnnnnnnnnnnnnnnnnnnnnnnnnnnnnnnnnnnnnnnnnnnnnnnnnnnnnnnnnnnnnnnnnnnnnnnnnnnnnnnnnnnnnnnnnnnnnnnnnnnnnnnnnnnnnnnnnnnnnnnnnnnnnnnnnnnnnnnnnnnnnnnnnnnnnnnnnnnnnnnnnnnnnnnnnnnnnnnnnnnnnnnnnnnnnnnnnnnnnnnnnnnnnnnnnnnnnnnnnnnnnnnnnnnnnnnnnnnnnnnnnnnnnnnnnnnnnnnnnnnnnnnnnnnnnnnnnnnnnnnnnnnnnnnnnnnnnnnnnnnnnnnnnnnnnnnnnnnnnnnnnnnnnnnnnnnnnnnnnnnnnnnnnnnnnnnnnnnnnnnnnnnnnnnnnnnnnnnnnnnnnnnnnnnnnnnnnnnnnnnnnnnnnnnnnnnnnnnnnnnnnnnnnnnnnnnnnnnnnnnngtggaattctcctccttcctcctcctccctcttccttcctcctccttcctcctcctccttcctcctcctcctccctcctcctcctcctcctctttgtcctcctcctcctcctcctccttcttcttcttctttaacgccattatagaaaatacagaagtttctcctttgcctcttctcaatttgtcttcagagcaggacgaagccttgacattgttgtgggtagagtattagggtcttctgcagtgtctctcccatgacagttcttgcatgatgttatttttccttatttgaatgcattcaggacatagcatattatcttctattcctgggcatgatgggaaaacccaggatggtaacagacagaatgaagtcattgtctggggaaaactaggacccaggtctggtccctgtgaaacttcaagcctgtcttgtctgcagaggtccatcagccatggatcacccaccaacttaccatagaagtttgtaacaaaaggtcctccccagaaacaggaagaggacagcaatttacagccccggggctgaagggctcttgtggtaattcttccccaaccggcaaccacagatgcctgcactgaaattacaacttcagtgttagtcttctctctcgtacacctgttgctgctttctcaaggccttggttccttgctcacttccttcggtctcctggaacccagccgcaggctgcagcctgacctcatgtgatgtgctctgaatggcatatatttaccaagggttacacatgtctttggagtccctcatacacccgtttttttgccatccacactcaaattgttgacaacagccccacagagtactccagacacatttttaacatgaggcaggctagccggcagggaagagttgtcacattatgaaggggttttcgagaaggtttgattagctcacaggcggcagaatgtgaattagatgtctgttgcatcctgttgaagtgtttgaatccagtaggtgttctgtggcaggctcctctgtaattgggactagcgttaagatcacatttccttcgttgtattccctgttaaggtcattctcagggtagtgactggagtctgccatttttaaggatcactcgggggaccacacaaaggctacagagatgggatgtctgcagatcattgggacttccttctcttttgagggtgcagccgttgctaggtttcccatggtctagtgggtggtcccacactgatgtctatcccgtcagtagtgaggagacccagtggctatttaaaaaccacatggaagacaggcatcggtggtgcgcacctttaatcccagcacttgggaggcagaggcagggagatctttgtgagttcaaggggcagactggtctacagagcaagttccaggacaaccagagctatacagagagacatctcaaaaacaaaacaaacaaaaacatagttacatggaagggagggagagaggaaggacagaaggatgaaaggacagaaggcaggcaggaaaaagaggtaatatagtgtcactgttctgaaactggaacataggtgagcatttggagggaagggaatgagggtggggtctatcaaaacacatgatatgcactacgaaattctcaaacaataaaaaggtggaatgtaaaaggtagagaagttgggagaatgttgcagggtgtagggggacagggataagacagggaatggatgtgactgtatatcattgcagatacataggacattctcaaggaaaaagaaaagatgtttaagaaaaactgaagagatctgtttagaggagaaagaaaaaacaagcctgaaacgcccaccacagtgctatgcagctctgtgtggccatcagaagcgagcacattgggctgtgcgctctctgcccttaccagtgatccctccgtctccctgctgttctgtacagtaatggagccaccctgtctgtcccagggtctcctgaatttcctttcctgggtgacaaaggatggtttggctctttagatcccctgcccactcttaaatgagtttgtttgttttcttactgctgttccgtgtattttggatacagaatctctcagatatatatatatatttggcaagctgttttcatgcagtgtgtggcttgtgtctcaagtctctcaatggtgctctccagggaagagtgtttctaatttttataatgttcagtttgcacattttttctatatcatggaacttgatttcctgatgctgaatatagaaatttattatcaagctcagggtccctagagctttatctggttgccttttagacatttgcccattttgcatttaggtctgttttccattctgagataaattgtgtgcatatgtgtgtgtgtgtttatgtgtatgtgtatatgttgtgtgtgatgtgtgcgtgtatggtgtgtgtgtatatgatgggtatgtatggtgtatgtagtgcctgtgcatgtgtatgtatttgtgtgtatggtgtgtgtgtgtgtgtgtgtgtgtgtgtgtgtgtgtataatgtgtgtggtgtgtgtttgtgcgtggggggtgtatgtggtatgtgtgtctgtatgatgtgtagggtannnnnnnnnnnnnnnnnnnntgtgtgtggatgtggtatgtgtatagtgtatgcctgtctgtgtgggtatatgtatgttgggagtgtatggtgtgtgtgtatggtgtatgtgtgatttttgcttgtctatgtggtgtgtgtatatgtgtgtgtgtgtgtgtgtgtgtgtgtgagagagagagagagagagagagagagagagagagagagagagagaaaagggtcctagatttatttctcttgagagagagaaaagggtcctagatttatttctctttctgttatgaacaccatgatcagaaggaacttagagaaaagggggtttatatttcatcctagagattgcagatcagtgttgagggatgtcacggcgggaaagtgaagcagaaaccctggaggatcgtcacttactggcttacttacctggctttcctaaatagccaggttccatctgcctagggtgacaccgcccacagaggactgagagtcatacatcaattatcaatcagggaaatgtcatttagactttggccacaggccaatctgttctggacaattcttccattgagagtccctcttcacaggtaactatcgctgtatattaagtttgttttttccttttctacaaatagatacctgctggtttcagtagcttgtgctaggaaaggctgtccttttcccccgctgaactgccccaatactgtatctgtgtgcatttgtttgtttatgtgttctctgttatgacccattggtttaaatttctatactgggtcactgtggcactatggtgtggcaagtgccaactctctccttatctggaagccttgtttggtttggctgttctacattctttacccctcctaaagaaagtttagaactagtttgacactgtgtacaaaatggcttactgggattttgcccgggattactttgaactcagggatcagttcataagagttgacactttacaaatgttcaggggtctgtctgtctcatgagccaggcatcattcttgtattagttactttttatccccgtgataaaatttccatgacccaaaccaacttatccaaaagagtttatgttggcctcaggttccagagagaggagttggtaaggaagaaggcacaggagcaggcagctgcctgatcacctttcattgtgacaggaggctgagatagcctactcaaaatgctgtaagattataaactgtcaaagcccaccgtttgtggtgtacttcaaggccccatctcctaaaggttccacctacccaaacagcgccaccatctggggaccaggtgtgtaaacacacaagcctgtggaggacccttctcattgaagccgtgatacctctccatttagttagaactacttcggtgtcttcatcagagttttacagttttctgtatacagagcccatacatattttattagaactataaatggttcgtatttgggtgccactgttttttaaatatcaaattccatttgttcgttactggtacattggatggtaacagacaggtgtattaacctctgtcctgcaaccttgctgaatctgctcactgattcctgaaatggttgatttctttggccttcagtttgtttgtttgttcactggtgctttctatataagtaactttgctgtcattaaatagtccttttttctttatctctcttccctctcagtgtctataatttttattgccttttcttaggtcttctaggatcaagttgaataggaaaaaagattatcctttaccgactttgggtgttaaaaggaagacatgcagtttttcccagttagggcgactgtaagtggtagatgcccacatgtcagtggtcccacatcaaagggaatatgcagctcccccgtggggctttgtcagatgctttttatgtgttgatggatctgaattttcatctttagactccctgtgtgctgactacacccaaccaatgtttaaatattgaacgagctccacacatctgttcagggcatcagtattgttggaactgactagctagtatttcatcaaagcctttatttgtttatcgacatagacagggtctcactctgtagtactgactggcctggaactcattatgtggttcaggctggtcttgaactcacagagatctgctggtctatgcctcccaagtgctgggattaaaggcatgtgccgccatgcctgacccttgttaaagacctgtgtatcctcattgatgaagtgtgactagatctgtaaactgatataaacccttttctccccaagttgctttggtcatggggtttaataaaagcaatacaaaacaaacaaaaccaatatctttttagagaaattattctctggtcatttatgaatactaatatataagattaagaaaaatgaatcatttgggagaggagaggtggaaacaggaggaccctgcctttggatccttcccatcagaagttaagcattggacactcaaagcgccatttctagctttcatgttgaatgggatattgttggtgtattgtgctcagcacatggtataggttagtactgcttttaatgaggattctttgtcagtcacctgtgtccacccatggacaagactgcctccccaggggtcagttggttcttcatggctaagaatcctggcattggcagaatgctcactgacaggtgtgggccacaatactatcaggtccccacaaccagtcataggctaaaaagtcccacagattattttctgaatttgaaaacgggtcacttatgtcctggactcgtcatcctcccggagcagagcatgggggcccctgggcattctgggattttctgatggaaatcgaggctctctctagttgacttacatggtagtatagcacaggccagtttctcacttaggttatctgattcccaaaggctctgctctgaccaatggaggcctgaacctgcacagccctgtgaagaggaagctggagacggagaaggactatgtctttgacaaaaggctcaggtacagcgtccgccagaatgaaagcaactgtcggtttcgtgacatcgtggtgaggaaggaagagggcttcacacacattcttctgtccagccagacttcggataacaatgcactgactcctgaggtaaagagctttggggagacaattgaattcaggcctcctcctcctcctgcccttgtcttgtcttgtgcttgcttgtccataatatcaacagaagcatggtgagttagcaacacgcctgggtgtggacacactctagagcagcgtttgtaaccttcctaatcctacaaccctttaatacagttcatgttgtgttgacccccaactataaaattgttttcattgctacttcataaatgccattttgtcacagttatgaactgtgatgtaaatatctgtttttcctatagtcttaggggactcctgtgaaagggtcgtttgacaacccccccccaagggggtcatgaccctcaggttgaaatccacctctctagagggcctgcccattcaggctggcattgattagatgggatggtatccctggtacatctggcaccctcaggaataaccatgaagtggtggtggtatgtgtgtgtggggggggtgggggatacaatatccttgaacttgtgaccacctgtcttatgtgatttacatagataatggcttttatggaattgtggatgtgacggcccagaatgactgacaaattgtgagggaagagctgacagacgtctttggggtttataggcttgtggttactagtgcccctctgctgtgggctgtcctgatgctgtttttattctgatgttaattctgcttcctcaagaggggctgcccccaaagaggggcaacatacgcagttgatctcatgtgaaccttctctccattttaatgatcaataaaggctagagcctgtgatcgggcagtggaggggaaaggtgggactggaggtttgagagtggggacaggtagagagaagagtactgaagaagaggagcaagccatgatggatcagaaccatgtggccaggagaaactgcaagtagcaagaggtcttatatctggggttttagttattatagcattagatctgcccaatctagacatatagcttgtaattataataactagattgtgtgtgtttttatatgagttcttggggttggaaattccagcaatacccctcctctatgcattgaattgggggggggggggagctcttcatctactttggcagaagccacccaaggcttctctgtaaggtctggagtgtgggctccttggtaggcggctcctcatgtacacatacacctggaaccctagttactttaggctcattgtgacacatgcacacgagacccattcttctttcattctcttccacctcactacctttaaaaagcttttttaaaaaggcacatcattttccttccataaatcgaatcaaggcgatacttctcggtttactctgtgtctgcggaacagctttgtgtggtagtgggtgcccactcatcccagaagacagactgtgctcactgatctgtggtatccaggggtactgcctaccgagctgtgggcttggtttatgatggcctgcattccccatctgcatcagtcagttacaagaatgagttatgggtctgatgatttccgcaagacggcaggcaccttgggtatagcagtcctaaaggaagaccccacagaatctaagaggtggggttgaaggaggaatgtagatttgggagtctagcaacctagattccaatcctggtcccactgttaccaggggaacttactctgcctggttatacctcctgtttacagagatggtacttcatcttctttgtaagattagagacagcgcatgcggtactcaggagcaggaatgtctggtacccaagggtggcctatgggggctctcgctgtgactaggataagccaagggtgttcagtgtcaccaaagtgggctcaaggcccaccttgcttgctagtgaatcaactagaagggactctttcctgatgacagttggatctcttctcctagctgtacacgtgtcattgggtggattgaccatacaagtgaaatatccattcatgactagatgcattgactcagttctgagatcagaatgtgtgccgtagtgtttttcctgtcaggaatatggcacaggagtgggaacaagcccctctgaaatgagccagcaaacaaagctccacaattcaaagcttgcccacttccctttgaggagaggggccacgtgccagcctccatcttcggattcctccagtgcccatggccgcagccagcatccccaccagaatccacggtgtttgaggtgccctttctgtcgctctgacaaactaattgagccacaagcaatttaatgagagaagagggtgtatttcatcttacacttccaggtcagccacaaaaagaaatcagggctggaacttgaggcaggagcctggaaatccgaaaccctcgaggaatgcggctctctggcttgctctctgcttcatgttcagctagctttcttatacaacccaggaccacttaccttaggaatggtgccgctcagagtgggctgtgccctcccacaccacgctaattcccctaccagacatgctcacagctaatttagacagttcttcaattgagggttctcctgtcacatgtctctgagctgggtcaagttgacatctaaaggtaatggggacacataggaacaggacacagcccttttgtcagatcaggccatttggattttcctcaaaacccacccccttcattttctctgctgtgcacttgcctctcatactgaacttcttctagatttgcctatatggtttcctttccgaatgcatttttcttctgcctgaagtccacacctttgtaagtatatttttctagagtcttaggtgtgagaaacatctcatactaaaaacatctaatttttgcccgtgctttgaacagtcagtcagatttgtgaagaatttgttccatacatatttttctcagtacaccgagcaccaccttcctcccatgcttgctagtcttctttagaaccatcctctggttaaaggtctaccttcaagataagctttctttgcctccggatatttgaagttttatctttgctttatatgggctttctgcgcagttcagaattcagatcagtatcaaacatgcatagaccctttcccaccaggatgttcctgtcctaattctggaacccaagacggtattaagtcacatgcgcaggcactaaggtttctgaaggactggaggttgctcttcagctaacttgaaggtgatgagattggttttggaagggaaggtctctgtggtctcggtgtcaccacggggtccttagggcagagaggaagacagaaaatcagtgtcagagagaggcggagtgaacggtgagtagactctctggccttcgctggtttggaagatgaagagtggaggcaggagctagggaaaatgcaggcagtgtgttctcccgtatggcctccaggtcgggatgcagtccaccagcatctgtctgttctcagcctgtgtcagacatggcgttgcgtgttctctctgacagctgaaggcagctcccgcagcatccgctttcaactccgtgacttacacttactgcttgttacttcctctcttgtttgtgttttctgtctgtttctccatcctgggctcagggaggcggcttcagactttgcagtttgcttagtctccccctagctccgtttattctgatgttaatctagccagagattcctggctttgctgcccatgggattcgctctcttcctcaaatcttctcatttcattctctgttagtcaccattgtctgcctacgcccttcccctggtttggccattttcaatgtattctaaaatgttatagactttgagaccaatattaacttaaagtcatcatgtccttcccgtttgcgtgccagtcatatttctcaaatgcgttgtcatttccctgtgagcccatccacgctggggagtctgtccctgtgcagctctcctgtggcttgagattcggtttctctcgaaagcacttctgtatattcatttttatgaaaggcctcagggacatctctagcttgtatccaattcccacatcagtcaattaattaagtcttaaaggactttactttttatttcacatatacacacaaacacacacacatctgggtatgcttttgtgcacaactgcagtctcctcagacgccctgctcctagacctggggttagcagctttgagcctcccgacacagctgtcaagaacccaacttgagacctttgcaagagcagcgtgtgctcttgactgcggtagagatggctatctccatagccctttcttcttcttcttcttttttttaaacttgactatctctcaaccctgtggtattacaactttgtgttggggttttaagttcttgtgggagattttacctacagaaaatgttcaggcagcttgttctgtgatgtggaggaaggaagggccataccagttagtattcgattccaatgtaagtttcctgtctaggaagccttcattttgcatcctggccacactgctgccggtcatcctgaatgcccaggctcttaggagatgttgtgtaggtggcacggacagtgctcgagacggggctatgattggaatgagccagagtgtggcgggctacgggtgtgggttcatcctgtgccagcctttgaagtcctgcattctcggcgtgtggggcatgcgagcggcagtgcaccagctgctgcttctgtgatgactttggtagcctgggagaggtggctctgctctcttcttcacactgcctcactgctccacagccaaacaggaggctcggttatccagagccaagatgcttcgacaggcagctccaccttcagctgacgcttccaagtgtgaggttacagccagaagctgcgagagtcactgagttgctgtgggccacttttgaatgtctatcactgaggcactgtgacagtcttaagaatacagcaggaactaagaagatagctttctgattattgttcaaaccatggtctagctggggcaaacaattgaaattcccctgtggtagcatgacgaggagagcaagatattcacaatctgggcttcactattccctctgaggaatgagaactttcaggtggcctgtcatttattgctcacctggagagaattctagactggcagatcctgaatcttgtggataatacacagcagactgtgaacttggtcatgtctacatgctaaagcatgctgaccatgggccacctatgacccctgcaagggtctagggagataaaacaagagaaaattttaactgagacaactagaggcttatatagctcaccaacgctgtgcagaggaccactttcccatgctttttaaggggttcaaccagcaaataacctaaagttggctaacagaagttcatagagacagatcaagttcacaccaggctcccaggacttccatgttgatccttccgctttcactgagggtggtgtgggaaggttttggttcagtgaagtttctttccccggggatggacgtgtgcttccattcaggggaagtctctcagacattcaaagctctgcgaactcacctctgcctgcagatcatgaaggaagtccggcgagccctgtgcaacgcggccacagatgacagcaagctactgctgctcagtgccgtgggcagtgtgttctgcagcggactagactattcctacctgatcggccggctgtccagcgaccggagaaaggagagcactcgaatcgcagaagctatcaggtgagtccgacctctctctgaatgaacgctttggggagcctgccaacggtgaccaaatttagccagttaaaagtacaggctgcccagctgtaaacgtacatcaaacaatgtgcgattttatttttagtgtgagtatatcctcggcaccatttaggacaccaggacatacttacattttaaaattaccgttgatttatctgaagtttgactctttttgatgccagggatcaaacccagggtcttgtacatgttggacaaataaatgttctaccgttcagctccgtttccatctctgaactgtggacacgagctggccagccgacgttttgtctgtggccccatggcaggctttgctctccataggttgcatttcatgcccgcctcccctttttgttttttgtttttttaaaaagacatacctatttttcccattatggcctgcattggcaatgcctgtgatactttctgattccaccttctgcctggtagtatggtctttgattatgtagccatttctgtgtcctggacctgatgtgactcaattactagggagagagtgaagatactatatatacatctatggcattggtagacagggtgggtctagagtgcccctttcaaagtctgtgggtcagatgtgtgaggtcttaaacacaggataattgtctatttgttatttcattttcatgtgtgtaggtaggtgcacgtgtatatgtgtgggtacatgtgtgcatgcacagtggtcagaggtcaacctcagatgttctttctcaggcgctgccacggtctctcactggcccagtacttgcccagcaggctaagctgactggccagtgagccccagccccacctgtcaccacctccccagctctgggattacaagcaagcatctgccaaaaaagctctgccttttttttttttttttaaaacacatgggtccccatgcttgtaaagctagcactttttttttaaacccactgagctgtttccctagcccctcccacttattcataacaaaagcaaatgaatgaactctccagccaggtcatttagctgcttgatagaggccactcatgagcctctctctgggagacttgcccttgtgccttcctcaagggatgagacacagctgagtcacagcccatggtctcaagaccagggatgtttactccacgcggagtctcggagcctcaggctgccgactgctcagggtctctcagtcctgtggatggttccagcagaggctgacttccgtgcggtcactcagggaatcagaggatgcggtggatagcgcgaggacgttcctttgtgtgaattccaggcccgactttgtatgaagtgttgctcaggaatgcctgtgtgcttccccatgcagcatcctcctcctcaggagagaactaagaagcctggaccccttcctgcggggagaggggggtgttgacgtcacttcctgttttcagggcgcagccagctcctgcctgtgaaccctgcagtttctgccttgtttgagctcagctgtgtcttctcagtgctggctttgcatgagttgaaagagcagcaaaggcactagactgattccctctttatcgacggggccaccagagcataccccagggaccgaagaacccaccgtgaccctagaaagcctagcccacagtctgcacctggttaccgatcccactacaggtgcttgtggtatctccagcccaggcaaacatttaagatccagcccagggttctccttcatgcaggaagagctaactagcacttggacttcttgtcctcagagagatagaaaacacttcctaatctattcaatccatgaagctgagttaattcttaatggaatggagaatggacctgaagtagcctctaagtgggaggtgatggtatgtggctgggagtgacacaggaaaaggcgtgacacgtgaaataggaaaggggatgtgacagagactcaagtaaagcagctgccagccatggagcacccaagaaggctggcaccatcagcaggtgaggggggagctctggaaagctcctgcctcagtactcagagtagaccaggacctggaatgtggacttcttgtctccaagtgcactacagaataaacttctgttgttttgaaccacggtttgtggtcactgtcatagaagccttaagtttttaaggaaggcattaacactcagaatgcccccgaccttctgggctcatcccatccttcactagagcatacacgggcacacacacacagacacacacacacacacacaccacaaacacaagttattacctttatgtttgggactgccgttctgccagccacaactgtggagtaggcttttagagatctttctgagcttcagatgacagttgccatgtgtggtctggtgctcgtagaccctggacagcctggcatagctctagctgtcctggctctggttaaagggaatgagtgccagggtcacaagggaagtaacaattgcttcaggcgacacagtgacgtccccagtggtagcattttgcttgaattttctctgggatagaagaatggaccacagactaccatgaattagatgagagctgcatatagaaacagaggcctggtcatagaagcctgacccattattcctcatatgctgggcacttgctactcttgttgaattctcatttatcaacatgagtacccggcattggccttcctattgtatagagggagaaaaacgaatctctagagcccaggcagcttgtctaagatctggctgttagtgagggacagagttgagatttgactttaactgtcagactcctttgatgttccacaccactttcaagcgtcccatctgcctggtcaggctacaggcacagggcttgagctgagcagagggagctatctgcaaaagaccagagtcagtctcacagtcgtggacgtggacgctgggggaaatacagagcagtcctctgagcccagcccagccctgccactgaagcgggatcagatatctgagcctcaggtctgtaatgcaatatcctgttggctgtttggcttgtgcatcctcgggggccttgtgatagagatctcacacctgaggtaagagaaaaaggatgggtgggggggtggtccacacatcacatttacatcagaacggtgaaactggagcagctggtgctggaaggccagggctgtatgggcttcaaacctatcacctcttcagggtcccaagtacccatacacagaacaaaagtctctgggtcctgatgtggaagcctctgggagggatggggtgtgcagtaggttactgaatgggctcatgggagtcatgaggacatcagcaatatctgcctgaggcccacagcatggaggccggtttcatagtcatggactttccgtagctgagagcatctgacgaatctgggtcagtgtgtcaggaagggctgtgccgatgcccttggtatccccagagggagtgtcgactgagaggaaggggtggtttcaggagtctaggaagtcttgctgtgtctcagatcctagattttagatcctagattttagatttgtacagaggttcttagaaaagggatgtctgatgaaatccacccagctcttggcttccctggactatccatgagagttccatattcttaataggctcaagctgcagcggtaaaaataagccagtgatctaacctaaaacccagccacagagggaagggagaatccaggagatggccactgcaaaaccagtcgccagagggggatggtattggaattctctctttgaagcagggctgtgactacagtgaatcgatcatcatggtcagtgtgacatgcaaaatgaggtcaaagctgagtacctcctaatagcttatatagagagatcttacggtccccctaccttagcagagtataaaacagtctttcctacaggagaagctgactccagcttattgctgttgtccttgtcccttttgataaatgctagcaggggaaacattgtcaacagacagtattgacgcagttccatgtctgtattagttaagcattagctgctataacaaataaactcccaatctctaatggcccggttttgatcagtgttaggaggggcattatcaacagaatgtattgactcagctccttgtgtatattagttaagcattctgatagaataaataaattcctaatatataatggttcagcgagaccagaaaattttcttcttgtgcctggaaaagtaaataaattaccatccattcctggccgtcctctgaacagtggtataagaatctaaacccttctatcttgtgttccagtggtgtccttcagttagatggcagggcttggagatttgcatggcggtggcgggggtggggggggagcttagctcacttggcaagggtatatgtgctctatactcatggccagaccttggtaacttggacatagccagttacaaagaagcctgagaaatgtggactattaggaggtcaggaagaagggggaacagaggcagttctttgtatctcttctaggagaccacgtatttcttcaagggctatttatagggtgctaatgtcaacgttgacagaagccaggcagtgccacaggaagatctgtgagtgtcccttgaagctaaaagggtagaggattaataaaaaggcaaccggactatcagtagagtaactgcaagttgtgatggtggcctgtggacatgaacggtaggcagggtcaggagtggcaagagaagcccagagaggtaagctagggcagactaaagtggttctcgtagttcccagtcttccttccaagaacactgaatgctggcttcactagatgtcttgtaacttccctccattcccagatgagttttaacatttttatagatctcgggtagcaactagaggaaagacagagagcctttaaaggcaacagaagtcacctctaggggctggagagatggctcagcaataaagactactttcagctcttccagaggatctgaggtcagttcctagtgcccatgtgaggcttctcgccaccaactgtaactccagctccatgggatctactgccctcttctggcatccaaaggcacctgcactcgtgttgcatgtgcacacacacacacacacacacacacacacacccacacacacccacagagtgagtaggggaggtaaacatcatgcctagtggccctgtttcatagtaaatacacatactgtaacctagatgcagaatgtcggcagagtaagcatcactctgttccttagacttgagtctagaagcgtcccaatgggagcccagcatccttccccagtccttgtcaaggcccccctaacgtcagaccctcataagcaccgtggaaccaaccctgatgactctagcatctctctaggtaattcagaaccagcccatcccaggattggaagggatcttaggtgtccctagggcctgccggcgtccaccatcggaagcttgaacactacttccatcatcactcaaagtgatcaagccaaagccagatttccctccgaacagtgaagtcatccctccccagccgctgcatcttgttctgggatgttaggtcatttgttttccccttgagatggaattacccttgaggggtacttctgaagggggccttctttagctcttgtatagaactatgatgttctgcttatcttcctttaaggtctacaagttttcagtgtctaggatgcccatagaattcacggttaaggtcatggtttttgagttcagagggggaggtaacgaggactgagaactaggctgacgtcaggcgtggactaggccagcaggtgtgtaccatcccattcatcctctccccgccctgtcccccagaatctgccagctctgtgcttctgtgagtagggcatgtggcctgtagttggcctctacctgcttctgatgaccaggaattgtgccgtggctcctgggagaattggggggagccacagaccagcaaataccagccattagtgaaagaagttcttctctctctttctccagggacttcgtgaaggcctttatccagtttaagaaacccatcgtggtagccattaatgggccagcattgggcctgggagcctccatcctgcccctctgtgacatcgtatgggccagtgagaaggcctggtttcagacaccatacgctaccatccgactcacgcctgctggctgttcctcctacaccttcccccagatcctgggtgtggcgctggtaagcctcctgcttcctccataacttcttgcttggtctgagaggcatgtgtctgggtcttagcagggcccttttcccagagttggagtacagcagtgccctatgagtgaagcccaggtatccattagacccaacgaatctgctctggcatcctctgttgtcccagaaccgctgtgactgaaggcaggctgatctcaaccagactgaaaggtcttcaagctgtgggtgtcgaatggagtagctgagctgagccgacactgatgctgccgagttactgtttacctactgtgctgcaggcgccatgcacacagaggcccccttattcctcattacactctggtaaagctgtgcctttgggagagatgagcgctgaaaccaacagccgcagttatcagaggtctcgcacagtggtggcaggacaggtctagtcacagtagtgccggcaggacatagagagcattcacggtgtgtaggggccacacacaaccccatgaggacgatggtggtggttaccagtgaacatatgtggcagaccaagactctgatgactaaggaagctatctaaagccgtgcagtgagctaagggatttgctcagttggtctcaaggtcataagcacaaggacctgagttcaattcccagaacccacattaaaaacaaaactcagagtagtggcagatgcttgtaatcacccgacaggagagacagacagacttggggtttgctggtcaagccttaaactacctggtgagttctaaggcacgatgagacacccatctcaaaaaaaggaaggtgatggcgcctaaagaatgacacctgaggttatcctctgacctctagacacacgtatgttcacatgcacatgcatgaaaagtggttctcaaccttattgtatgccgcaaccctttaatacggttcctcatgtcgtggtgaccctcagccataaaattgtctttgttggcacttcatcatgttgccagtgttatgaataataatgtaaatatctggtatgcaacctcctttgaaagggtcattcaattcctgaaggggtcctgaccccacaggctgagagccactgtcctggggtttgcatctcttatggttcactacacagtctgtgttctcagcccagcctgccctaaagcagaagtacgaatgaggagcgagtctcagagaagtacagccaagggttcagacagtacagctggaccaggcaggtgttagagatcaccttcacatgcaaggtggtgggaagaaggtagcctaggtggcccagctgacctgagccatggaccgtgcctgtcagggaggaggctgggacgttgatacaatcaatgcaggtttccaggaggcctgcttagtgaatgcaggaggctctgacattcaggttatgggagagcccagagtctgctagggctgcctagctctggtgaaagggacagccctactgctgtagagctgtgagtacactgtccagtgccctcttgccctgtcacgtgggtctcttgctaaccgtttcagtttcagtacaggctccagggtactttttttttggagatacttattacgtaatccacctttaagcaagccccggttaccccaaggcagcctgcacgctagtacactagtgaactctgacgacttctgtccgtgtaggtgctctggaatccctgggctgcacagagagctttacaagtggggtgggggtggggtgagatgtcccagcctgccttggccgtcactgtgagtggctgagtcgccatatcccttctgctttattagtgtccttactcgctcctttcaaaatcggtccctccagcagtaatgaagacagtgtccctccatcatgacctctgaaccacacaccaggtgttggtctggcaccatctccagtgatccagcctcacctgggagcccacagccctggctgtcaaatgcctctggcatggcggagatgcctgtgaggtttaaatgacttgcccagagtcggaatcaggaccaaactttatgttgctattttcttcgctctagcttgtgttatttgttcttagtggtccttgtcagcagttctctggcctagccagctgcccaagaagtcccttccttgggtctctagatgagacccatgtttctcttccaagagtgcactggaagaacaaggttggcgatgaccgggagactcccgtgtattccgagagaccacgtgcctcacatctacctcagtgtagtatcatataggttcacagtgtaggtgcaggctggtgtgtatcacaatcacagacagaccccactttccccagcttcctgtgaggacacagaagatggccattctcttcccagcgagttcctatctctagtcctgtcctgatttaggcaccacatcttttatggagcaggccagcaggtgggacttagaagccgtttggactcaagccctgtaggatgtctcaggtggctcttagcctccttggttgtggcacagagctgggaagtgacactttaccattgacaggagcccacaccagctgctccccatttttgtggccataaaaatgtttaagctgtctggcatcatctctgccttcccaccccggctgggactctaaaactgtgtagagggacatttgttctcagccaagttctgtcccaaaaagggagagggagaggaagacacaccagggccccatagtctccttcaagtgtaccccttgtaaagggccccatttccttttttgtttgtttgtattttttgtttgtttgttttttgtttttcgagacagggtttctctgtgtagccctggctgtcctggaactcactttgtagaccagactggccttgaactcagaaatctgcctgcctcttcctccccagtgctgggattaaaggcgtgggccaccatgcctggctaagggcctcatttcttaaagcttcaccattcccccaaagaatcaagccccagagaccagtccgtgaacattcagttttggggaacatgtacggtcctgtagcacagcatatgacagccgcctgtttcaaaccagacggaaactcctttgaagagctgtgtgcagaggcagcccagccaaggaaggcatgctgtatccgtcataactgtgtatttattgtctgttccccagaccaccggataatgtttctctatcttggtggcaggatttttggggttcctaatgcagatatttttgattggcatacacacacacacacttaatggttctcctgataagtttttactctccattttccgccctccccccatctctgcaccttccttcttccctcacagactaattgtctactaagaggaaaaacttgcctcacattccagttggaaagtgctaacatgtaggtcagttatcccctccttcctggaccaaccttcgcagggccaggctattcgcactaacatggacatctaaggcagcgcatacccaccccagttcaaccactggaggagagtactgctggattcacggagcttcagtaaaaggctccttatgacagtttaataaaagccgtgccagacgtttgtatgcagttcgtatggtgtatccaaccctaggttgtgaatccagccacagagagcagaagcactcacacctagctggtccagggctccctagaggacattggaggagctctgtgccctcagctctctcctgcgttcgctctttcaggccaatgaaatgctgttttgtgggcggaaactcactgcccaagaggcatgcagccggggccttgtgtcacaggtcttctggcccacgactttcagccaagaggtcatgctgcgggtgaaggagatggcatcttgcagtgctgtggtgagtccctgtgtcatccttctgcttttgtcatgaatagatggtgtgtgtgtgtgtttgtgtgtatttgtatgtgtatgtacatgcatatgtgtatgtatgtgtatgtgtacatgtgtgtatgtgtgcttatgtgtatgtgtttttgtgtgtacatgtgtgtatgtgtgcttatgtgtatgtgtttttgtgtgtatatatgtgaatgtgtatgtgtgtgtacatgtgtgtatgtatatgagtgtgtatgtgtgtttaatgtctatgtgtacatgtgtgtgtatgtatgtgtacatggctgcatgtacatgtgtgtgtttgtgcatgcgcacatacacgtgcaaataaaattctgaggccaactaggagtttctaagtcacctctaccttatctcttaagacaagacctctcacaaaacctacagcttgctaatttggcttaactggctggactgtgagcacccagagaatccatccttatgtctccacttccccagtgctaggattgtgaatgtgcaccactatactcggtgctagtgtaaatgtgcaccaccatacccagtgctagtgcaagtatgcaccaccatacccagtgctagtgcaagtgcacaccaccatacccagtgctagtgtaagtgcgcaccaccatacccagtgctagtgtaaatgtgtaccaccatacctagtgctagtgcaagtgtgcaccaccgtacccagtgctagtgcaagtgcacaccactatacccagtgctagtgtaaatgtgcaccaccatacccagtgctagtgcaagtgcaccaccatacccagtgctagtgcaagtgcaccaccatacccagtgctagtgcaagtgcacaccaccatacccagtgctaatgtaagtgcgcaccaccatacccagtgctagtgtaaatgtgcaccaccatacccagtgctagtgcaagtgtgcaccaccatacctagtgctagtgtaaatgtgcaccaccatacccagcagtttacatgggttctggaggatcagacttaggtcctcatgcatatgtgacgactgagccatccctgcagccttcctgaggccctgcagagtcagtgaagggttttctgcagtgtaggatttactgcctcttggtacagaatgcccatgttagaggaggtggcccaggatatggcatagtcttatccatgccctcagaaggggttcacgggaaaggcttctactcttgggcagcaagcatggtgtagagagaaagccctgaacacccacaacatcaccaaagtcataggtcaaggggtgggaccgcccaggacaagagactagggcatgctgccgctatatttgatttcttctgtccagcctgctgcttgacacatctaaatatcctcttgactccaaagattcaggaaaggagagacaagtcacacctccactgaggtgctagggtttcattaaatggtatttgttttgttttgagagactagagtgagcacaagaggagactctcccatggggagagggaagaaaggctaaaacatggagcctcagggccagctccagtgggtcccagacactgggggaggtcctgcattcttgcccttaagaaactgagtgcttgctggtctggtctgtgggacatacccttgacctcacatgccttctctctccacagccatcccgctgtgacacccacctggtgatgtgggcgtttgcttggcctcttctctgcagccatttattgtacacctactgtgtgtgcgtaccccaacaggagtcctgctcatgatagtctccataggatgcctgtgcacttgatatggacctcgtaccttactgatttttatgtagatcctcttttaactcttggctgggctatttactcaccctctttccctgggattctccatgtttcagctctgaaaatcttgccaggaaaccttatgttcccaagtaaacaggcatgcttaatcacctgagaatcaacttcacagagagaggcaaggggagaggagagctcaaacagggcatgggaggcaggaggcaggaggtctaggtatccagaggcatctaagcagtggctgtggccagtttgcacagaggatgtctgtctggacaggcctgagcggctgtggggaatgtggtctgcactctgggaaagggaagcacccaggtgaagcagctgtttcaaggatcactgagggggccagtttgtaggaaaggcccactcaggagaaacttctccaccagtgctatggacccaggaactttaggtgacttcctgagagaagactccgcctcagagagatgcctgcagtctttggaggtgatgccctcaggagagaaagattccaggatgagaggcaaatgctcctgccaccagcagcctcagtctatgctggagtgcaaggtccttctagaaggctggcacctataagtctgcccctggcctttggctgtttcaaagtccttagaacaatgtgaatctgtgtgttgcccctggggaggcattgtcatggtcggggatcagccagattgaagttccttattgtgctactgttgaatgatccagccctgggccaggttacctcctccatctacagtaggggttgaggttacctcctcatctacagtaggggttgaggtgtgaactagagaagccaaagagatcagaaaaaaaaatatgtccatgaagcctgttcatctcgtgcagttttaatgctacaattattgttgttcggcactacgattactagcactcatttctctagtattagtgagcttactcattgccatctcactacatcattgctcactggtgtgggttttatgttgattactaagtttattattgctcctaaccacaaccatttctgcgcttgctgaaaattgttactatggtgcagtgtgattcatttctccaatttacacagttattattcactgccacgattgttacaggctgcaaccattcttatggtggtgactgctaatggtccttgttaccctggactgcagtgaccaccactgttaacagctgagcctaaaagagcatcctgtggggactccaacgactccaacgaccattatgagatcagctcatcacctccttctgagttcatagggacccttgggtttggttattcttcctgacaggtcatgaaaatgactctgttcatcatccatggggccgcgtcaaaaaatggtttgcaaacttggtcatgaaacccataggcaaatagcaccaagaggctgtgtggactcagccccatgggcaaagtgcttgttgtgtaagcatggagacctgcgattgatattccagaaactacatgtataatgtgtgtgtgtgtgtgtgtgtgtgtgtgtgtgtgtgtgtgtatgtatgtatgtgtatatatgtatatatgagaacctgtgctgggaaggagtatatatatatatatatgtgtgtgtnnnnnnnnnnnnnnnnnnnnnnnnnnnnnnnnnnnnnnnnnnnnnnnnnnnnnnnnnnnnnnnnnnnnnnnnnnnnnnnnnnnnnnnnnnnnnnnnnnnnnnnnnnnnnnnnnnnnnnnnnnnnnnnnnnnnnnnnnnnnnnnnnnnnnnnnnnnnnnnnnnnnnnnnnnnnnnnnnnnnnnnnnnnnnnnnnnnnnnnnnnnnnnnnnnnnnnnnnnnnnnnnnnnnnnnnnnnnnnnnnnnnnnnnnnnnnnnnnnnnnnnnnnnnnnnnnnnnnnnnnnnnnnnnnnnnnnnnnnnnnnnnnnnnnnnnnnnnnnnnnnnnnnnnnnnnnnnnnnnntcatatgtcaccttaggcaaggcccccgagtaccctgcttctctcccatagccatctcatggtcacaggctcaacaccctgaccacctgaagcccctcaggacagtgctcagccccagggagagctaacccagcatgcgtttctttccaggttttggaggagtccaaatgcctggtccgaagcttcctgaagtcagtgctggaggaggtgaacgagaaggagtgcgtcatgctgaagcagctctggagctcctccaagggcctggactccctgttcagctatctgcaggacaaaatctatgaagtctgaagggccccggctcacctgcccccacttgctcaagggtctcagactcccagccgggccctgtgtgtgtttctaccatcggagcccagggtccaccctagccaagagtttgtcggggtgtgtcttcacacctacggttgtatccattcctcgtgcccttcggttgttcctcattggtttgattttgtgtaaaggtggcaaacacagcacccttggcctccctgtgcaccctgtcccagccagccatagagccttccagggatccatcttctaagcgctccgccaggccctgtcgacctttcccccactagctgaaactctcctaccttggtccagaagggggaagaccaacctccctcatcctcccgactcagtctgtgtctacacagtgcctccaacttggagatgaggccatcacagttctctggttatgtgatctgggaccagggaacgatcgtcttagggaacccacagaccaacgagcgtgcggtaagctcttgactacataggcctggcttcagtcttctctccaatgcaactcggtgtgactcttagggcttggtcttaatacccaactgagtgatttacaaacccagatattgtacatttagaaacgttttgttaaatatatatttttaaaacaacgtgtaagtggaaattctgataatttatgtgtattatatgtaaagctagttttgcaaaaaaaaaagaaaaaaaaacagaagaacatgacttactaggaaatttttttctttatttgggtttattttatttatttatttttgtttatatattatgaagcctattgttcacacagatcttattttcataccaccctggaccaaatactattcaaggtgcacgccgtttggtgcgttcttgcggtgagccacgtggaaagagagaagagaagggattttaaaaaggcacaagcctgtgccagaccctctgtgtgcggctcatgtgacaaaaatgccagttctctaatcttcaaggacaagtcacggtggcattttctctcttagtctctgtcattcaggagaatggtggactctgctctgtgtcagccccgtccctaaagtcgtgatgttaggaagggatggcgagcagcccgtctttaggatgatatattgcctagggtgagacttttttttttttttttttttttttgctctaggataaataagtgaacttggatttccaagacttttccttccatatgaactttactgtcttggttggccttctgggggtgttgaggaaaaaaacaaaactcagtccaaacctgaacaataaatctttaatttttgttttttcttttttaagctgagagaatacaagcaaagccttatccagcatgtaggtctccttgccccactggccctagcctactggagcctccagtagctgactttatgtcatccagttggaagtctgcactgggggagagtttgggtgtgagttgatgaagagatgggaaatggaagggacctgtcgttgtggttgggacctcacacctatttgagatcatgtgcttagagaaaattagaccatggggcgtgcgtggggttccaggctagttctagatgggtgacaaccttgaccgctgttctttctcttcaattccctctgagtttcccagcctttctcagcccttccttggtgacagccgggcacagcgcagagtctgcacagcttgtggaggggaggtgggctgcaaaagtagagatggttctctttggctgcccttgaatgggaatagctgccccagtcacaagtgggagggatacatggccctaagctctgaaggatgcagacagttgaacgtttgcatgagaattagtgacctggctctagactatggctcccgcgtatgcacatggctttgtgggccttagaatgaccttgctttgctctatagaaatgctttagagctcagaagggttcaggaagaaaagagtttaagtccctattctccaccagcctgtgccaccttggccatggggagcctgagagtacagtcaccttggctgtatttggtcacaggaaaaagaaattggagcatgtggccccctggagtccctatagaacactgtaggagctgtgggctgactggggtgtagagaattaaggagcctgagcctcttgtcccttctctgctgggatgagctccatgtacacttaaccccacgcccttaagacatctcctgttctttacatgtctgagtaactctttcagatcgctgcctcctctataggaaacacctcccccaaacctttctgattagcttctgatcaagccagttttgtccatagggaagcaagttgtcaggattctctctagaaatagcacgggatgtttagaaatccctgtgatcagcagtcatctttgactcctgagcatacaaccagatatgctttctctcttggccatttgatgggcgccacacttccgaacatactgaggatctgtgatgactgaggtagacactgaccatttctgaggtgggatttacaccccttgtttttaaagactgtgttccgtctgttggaaggaggtagatctgccacatggacacaaggcatttagtcaacctcctgggctggccaaaccacaggagttggcattttcaggctggctgtttgggtagtgtggagttggaatccaggtgacccacatatagcagattgagctgggatggaaaattcagtggttgtgtccaggttacccccaaagctttattgaggtcaggtgctggctctctcatctttttactttgtaccccattgtcctctctcctcccatgaggtccttttgcttgacctgttactctccttgttccttttcctaccaccctttcctagggcccaagtaaatcttttgaggaattttagatgtctttgcaggcctggtgtatgtgtccctattgaacttggaagggcagctatgagtgagaggtagaggcttcctcttctaagtcaaggttccctctagcaagccatttgagactctcctctgtttaccacaaccttggtggtggcaactcccatatgacccggctggggttaagtgctcagatcccaggcgacttttgaagagttatggttaagatggccagaccacctcagcactgggaagccaccacctaatgtgggtgttcttgggtgaccctttactgggcagaagtaaagtccgagggaaacacatatgcagagaaaggcggggactgggggaaaatggggaaatgacgtaaaatcttactctgtggcataaatcaaactgggaaatatcctctcggaagcgggaaaagatgatttccctgagtgaagttcaacctgaggacgggaaaataatgacaggagacactgggcaaggcatatttaaatctccgaatccctcttttacaaatagccttgactgaacgctgagtcctatccctcactactaactgctggtttccaaaatcctcttaaaaggtttgttaaaaaacaaaattctctctctctctctctctctctctctctctctctctctctctctctctctagtttggaatttagtcctatccccactctttttcaatctaatttctgttgaagttttttttttttgtaaaaaaataaaaattaaaaatagagacatccaccaatcttcctatggggacgtttagaaggagggcttgcttctcttctgtgtttctttattaagatactgagatctgttgtatgtatgagccaagatgccctcactaatatacacagtatttaagactccacatgagatttcttgagtattttattttattccctgtaaatggttttgtaaaatcttggaaatgtacactttggttttgtagatagatctttggggcggggcgggggttgtcttgcatgtgtgttttttgttgttgctaattgtcacatcattctttctgcaggttttggttgaaatgcttatagaccttaatacagtaaatatattttcagaatataaacttttatatttctgtggtaaattaggacatgcgttttaggcaatcttttccattaatatcaccttttcctttgggggtgaaatatatctcatattggtttggtgccaatgttttggggttttttttttttttggtctttaatttttttaatttaaaatcagatagtcatacattattaagaaatcaagtcaatttttttttctctagaagtcattacgtttgaattctaatttgaaaatgtattgaatttgtgaataagccttaccattaggttcaataatccttctgacctttcaaaactacacgtgtagttcaagatccccccccccataaattctcactgtgtggcagttgatggagttcggaaaagagccttaagcttgttgcaaaaataataatataattaattaattaaaagggtaatacgggttgtttcctccaagtaagccatgttggtgggctcagtgcagtctgtaagtcgctcatggctaatctgaagagagtggtgggaggagctgatggcggcagggaccaggtggattcctcggcgaatgtctttggccataagactggaccgagggtaggttttcttgagccacttgtattctagtagtatggttgagggatggtgccagggagggctgctaactcaccatttgttctaaacaaatgacatttcctgctcctgaccctgctggggaccccagggtagctaaagtccgtgctctctgagagatgttaacaaagtttacataagagtcttgctgtgtagacaatctggagtcagtttctgttccatcatcggcatcgccatatgtccttggtgtttctgtgaggaagtgtgtgtcaagccatactagggtgaagtgtgctggatgaaggtactgtagctacagagagggagcagcaggtgacctggttcgtccagggctgtttcgatggcgaaaaaaatcacagagggtagagttaagtctcaaaaatcaagttataatatcttttggtaggtggcactccagccatcactggctgattctccttaccaacccttgaagtaggattttgcatttagggctatgtggcttagcatgcggtccatctctaggaagtgtccaaagtcactttctcagcctttgggattaagattggcatgtgtcagtcaggagacctgatgtctagagtgaagcttcagccttacgtctctgggtttgcctcaccctccttaccccgacatcttgtctgatgtgggagcttaccgactccaggatattcagagggtgttgagtgctccatctagtctttaacttaccattgtgccattagtcccagcttgaagttattttctaatgtctacgttagctagattgtgaaaaaataattgcctttcataaaaccaaggaccaaagattccattattccaaccaaacatgagtttcataagctgtaggcacatctgcatccagatgtgtgagtttcatggcacagaggaacccttggttcctcccacccccaaactcatgctccctgacttgccatgcagagaagttgaatatctcttgaaaaaaggctctgaaggaagagtttctgagatgggaacttagtatctcaggtgggtgtttctgcttgtatagccttaagttttcatttatcccattataaaacggaggtcagggatccctccgggtatctaaccacggtcaactcttccatttgcacgtgggcctccagctgaagttttgcagctaggtcttcggtagtacatcctgtgtgactgccagatgtccatctctttagtttctcatcaagccatcccacttcctgcttagtagagcaagaatgttccccggtgcccccaccatgggttgccccattttcatccccattcacgatgatgtcattggcctcttaactaatccagaagactgatgttaaagaagtggtattctactggtaaggcttattaccaaacttcggatactgaagcaggctaccaaaaacatatccagctcaccctgggagtttctgggttggatcacggacgtagcaaacacaccaaaatccacggatacctttgcaggttaggttgctcattttctttttcttgccagattttcacgggaaggtctttagttccggatccttgtaagtatgagtccttcatagggttatatgcaggtttagctggtccattctccacgctgtaaatattttccccaaactgggtgcagtactgagggtaataatctcctgatttatcaaatgctgactgtctggagcaaatcgtccgctctttgtgaatggtcctgtaacgtatatgaacatatttctgggtgccttagaagttgtatttttcatgtgtgctaatatgcagtatttatacattgtgagaagctgctttgaataaaaagattgaaaatttgtctccgtttgtttgtgtccccaccccacccctatccctttggtgatctatctgtagaattcacaaatggaggagtttccgggaccttggaggtgtgctagggttgttggcaaccctggctactccatccaggtctggcctgaaatgtcacttgtatagaggggcaacatttggatgccagaggaccttagaatggaggagacatttttcagggagctgacgtcacatttatctcttccctgacattcctgcccgcccaccatgttttataatattatagtccccatcctcagcagataaatatccacagaactcagtcttatacagctcatggtcaacagtgatgtctgtcactgtggacaaagtctctccatacccagaatcttgttgctttgtctattacagcatgactctgggaagaggcaaatggagggggtccctctaaagcatgcatgacctcgcacatgggggaagagtgcagaggtagtatcagaagtcttcaagggttttgtgataatagaattctgagtaagagatttatataagactatctacctgcctatctatccatacccactctccagctctttatccatttatctatccatttgtacatctgtcagttcattcatccatccatgtacccatccatccatccatccatccatccatccatccatccgcatatctgtccatctatgcacccacccatttatctgcctatctacaagcctttccatctgttcattcatttagcccactgtcacttacatatttttatccatccactcacctacatttccatctgtccatcagtccatgtacccatccacctgtctattctactgtccacttgtctgcaatccattaatctttcattcagctttcattgcagccctataggcagagccccagccccctgctctgtgtagggagctgcagaggtaataacatgagtagaagcctcagatcctctgtcctgaaatgtcatcatggtgtcgagaagaaccattcttatagcatcacaaatgtacttggagccgagaagtactcaaactccatggtgttgccttttagtgtgcacatgctaaccagcctggggctatcaggatgcctccgaagccactttccccttccctttgttgtcacctcttcatgttgaccactgttggtcttagtgcctatgttctctcagttcccaagactattcatgataaggaagggatcaagatcaaacctggacagttctgtgctctcaactttctgtcttcctgctggaagatggtgaaaccttgtggaagttttgtaagaaacgttggtgtctcagaatgtctcttgggttactttgctgtgatattttatggaaagagctgctttccctaccaggacaagaaaataatgtggctacacctccctccccagccacacatatcaactggaagatggacagtgcagcgaataagcagagatcagactataaaagccccatttttcttttgagataaggcctcgtgtatattaggcagacttcaggcttactttataggcaaggatgaccctgtctttctatctcccaagagctgggcttcagacgtgcaccatcatacctttatgaagtactggagattgaacctgggacgtactgcatgcaaagcaggcaagcaagcaagcagtctaccgattgagctatagcccctgtccctggaaaagcaacttttattgcctttgggggtcctttaggtatgcttaatgagagagcagtcctctgatccttgatgaagtcctggtgggcttcagcaccttcctgtctcatgggtgatagttctaccgtcacaagcacagactcagctgccatctgcgataactaaccatgatgcattttagatgtattgctcccaacttattcaagattaagacttctctcagcatcactgattgtcccctgaattgtctagtttgatggggagaacagaaaagatcttatgagctgaactggcaatgtgcttggatgggggtttcttctttgaaccttagagatgtttatgtcatattctgtcggaattttttggagttttagactggacagcccacggaattgccgggtggactgtgttattaaccccctactccatttctcatctgccccttatccggagtctgtccactacaaacttttccaattatgtcatcctcttcacaagatgagagggaaggcgggtaggcttttcttttattccttctcagtctctctgcctctccttccttcctccctagcccccaacccccaccttctttccctaccatgcatgcgcacctgcacatgcgagagttctatagttttcattagagaaatcctcttaccaccccttccaacgatgctgggtacataagcacagctagaattcatcaggctcttgcaagcagtgatttctagtgtatgtgtgtctcctgtaagagacaccttagagggcttgtggatattaatgaggatttgagcttttatatcaagtgagtcagaaaccccatagggctcaggaaggctctgcctggaccgacttgtggttccatagattttctcctttacaaaaagcagaaaagcaaagggcagaagcaacgacggtggtagaagagttgggatggcctttcggcactcttgagagagctttgaatcaaggatttacaggcaggttggttgtgaggagagagaggggtcaaggtcaaggatgtctgggactcgagcttcagcagtgactagttggaacaggccccaactaagatggggaacactctaggacttttgatacgggagggttatacagagatgagagatattacaggaactcaactgagcctggccacacaggtactggatatgtgttcctgcttagcccaagggaagcaatactgctggtgctaggaagataacagacagaaagacagacagatagacagatacacacacagagaggcacataccatatccacagatgtgcacaggtatgtatttctttgtgatatataggtatttaacatatgtggcattaatgtaagactaaattgtatatatgaaatagctgtgagcatttagtaattttaaatcattaaatgccatttaaatattagatccatataaagatgactacaaatatatgcagaacagttgctagcatctagttactgtttaatgatttaaatgaagttttcatatatatgtgtttgagatcttacccatataccacatgtaaatttagttatatatgtcattatattgtagttttatgacagttattagtatagtccctatgtaataacttagtgtcacttacatgtgtgtgtgtgtgtatgtgtgtgtgtggggggcttatgtatagagatttatgtaaatttatgtaagatctatttaaatgagaaacaggcatatacacatgagatttcatctatatataaaatgtttaaaacacttgttggcacatggtcactctttggagattaagtgacccttaaatatatgcacgtattacattatttaaaacaaaatagtggttaaacacacgcacacatatccttggcaattggtactgtatttctaattaattacttaggctggcaagtgtctggtcagggatggggcacatatgttggaacttagcaaagatggctttgtgaaccacatgtaggtcttgagcagagcttgagaagcccagagccacgccagggattctgtaaggtttatctgagctcacagagaagtctctgcttgcatccactgagcactggtccccagacaagctccttatctgagcatctggaaccatcttacgtcctttatgggtctccagtttcccttgtctgtatgcagggctcccactccctttctcgggaagccttgtatgagtgggtgtgtgtgcaatggtgtatcttcctacagagtttccacaatgcatcctggctagaatcttccagatgctgaggttccaaacatatgttttttttttttctccactgtccaaacctcttcctgtaggcacagaggtggtggcattgagcaaggagtggtctaggtatatccctaaactggatcaggagctgagtcaagaggtgagtatcagatagtttgatggagatccgttagccaagaaccagaatctaggaaccaagtacatggggaacaaaggctaccctaagctcagcaggccagagggtagttcaagcactagaatggggtcactgccatcgtgcccaaggatggggatggaaggctttggggaccaggttgccagaagagcctg

SEQ ID NO: 1077 - DNA, 2690 bp, Mus musculus
acaagcaccagcgcctcagggtagcgaaggctggcccatttatttatttttatgacctcatgaagtcggtcagcaacccagataaagtgccgtgtgggttctgcaggagtactgggggaggttttgtatacctgagcacaaggctttccttgaacaccgagtaaccagttaggcacaatcttacatgtcacctgtcactttatacttgtctattgctcagcagaaatcgcagatggcttcccctctatgtgtcacattcttgtctgtctgaaagcccttcaagtacacagcacatctgcaggctataagcaagcttgactgttaatgaattcgtttccactctgaatttctaggttggatgttggcagccagactggcagatgtttagcggggactctgaggtctgtctgcccatctgtagccggacctcagacagcttggggcccctttggaaaatgatccttgggtcccacgtcttctcaccctcttcgtcttgcatccccaggttgaaaggattgtggacaagaggaagaacaagaaggggaaatgggaatatcttatccgatggaaaggctacggcagcacggaggacacgtgggaaccggagcatcacctcctgcactgtgaggagtttatcgacgagttcaacgggctccacttgtccaaggataagagggtgaagtcagggaagcaggccggagcctccaagctcctccgcgacgcccgcggcctgccagtggaaagactctcccatcggcctctggaacccgggaagagcaaaccatcttcccacaagcggaagcgcgtcaactctcccctgtccaggcccaagaaggggtcttcgggtaaggctccagacagggccaccaagactgtgtcctataggactacccccagtggcttacagatcatgcccctgaagaaggctcagaacggcctggagaacggagatgccggctctgagaaggacgagtcacactttggaaacgggtcccatcagccggatctggagttgaacgaccagcttggagagcaggaggccagtgactgcgacgggacccactccgcgctggtggagaatggagttggctctgctctgaccaatggaggcctgaacctgcacagccctgtgaagaggaagctggagacggagaaggactatgtctttgacaaaaggctcaggtacagcgtccgccagaatgaaagcaactgtcggtttcgtgacatcgtggtgaggaaggaagagggcttcacacacattcttctgtccagccagacttcggataacaatgcactgactcctgagatcatgaaggaagtccggcgagccctgtgcaacgcggccacagatgacagcaagctactgctgctcagtgccgtgggcagtgtgttctgcagcggactagactattcctacctgatcggccggctgtccagcgaccggagaaaggagagcactcgaatcgcagaagctatcagggacttcgtgaaggcctttatccagtttaagaaacccatcgtggtagccattaatgggccagcattgggcctgggagcctccatcctgcccctctgtgacatcgtatgggccagtgagaaggcctggtttcagacaccatacgctaccatccgactcacgcctgctggctgttcctcctacaccttcccccagatcctgggtgtggcgctggccaatgaaatgctgttttgtgggcggaaactcactgcccaagaggcatgcagccggggccttgtgtcacaggtcttctggcccacgactttcagccaagaggtcatgctgcgggtgaaggagatggcatcttgcagtgctgtggttttggaggagtccaaatgcctggtccgaagcttcctgaagtcagtgctggaggaggtgaacgagaaggagtgcgtcatgctgaagcagctctggagctcctccaagggcctggactccctgttcagctatctgcaggacaaaatctatgaagtctgaagggccccggctcacctgcccccacttgctcaagggtctcagactcccagccgggccctgtgtgtgtttctaccatcggagcccagggtccaccctagccaagagtttgtcggggtgtgtcttcacacctacggttgtatccattcctcgtgcccttcggttgttcctcattggtttgattttgtgtaaaggtggcaaacacagcacccttggcctccctgtgcaccctgtcccagccagccatagagccttccagggatccatcttctaagcgctccgccaggccctgtcgacctttcccccactagctgaaactctcctaccttggtccagaagggggaagaccaacctccctcatcctcccgactcagtctgtgtctacacagtgcctccaacttggagatgaggccatcacagttctctggttatgtgatctgggaccagggaacgatcgtcttagggaacccacagaccaacgagcgtgcggtaagctcttgactacataggcctggcttcagtcttctctccaatgcaactcggtgtgactcttagggcttggtcttaatacccaactgagtgatttacaaacccagatattgtacatttagaaacgttttgttaaatatatatttttaaaacaacgtgtaagtggaaattctgataatttatgtgtattatatgtaaagctagttttgca

SEQ ID NO: 1078 - protein, 517 aa, Mus musculus
PDLRQLGAPLENDPWVPRLLTLFVLHPQVERIVDKRKNKKGKWEYLIRWKGYGSTEDTWEPEHHLLHCEEFIDEFNGLHLSKDKRVKSGKQAGASKLLRDRLPVERLSHRPLEPGKSKPSSHKRKRVNSPLSRPKKGSSGKAPDRATKTVSYRTTPSGLQIMPLKKAQNGLENGDAGSEKDESHFGNGSHQPDLELNDQLGEQEASDCDGTHSALVENGVGSALTNGQLHSPVKRKLETEKDYVFDKRLRYSVRQNESNCRFRDIVVRKEEGFTHILLSSQTSDNNALTPEIMKEVRRALCNAATDDSKLLLLSAVGSVFCSGLDYSYLIGRLSSDRRKESTRIAEAIRDFVKAFIQFKKPIVVAINGPALGLGASILPLCDIVWASEKAWFQTPYATIRLTPAGCSSYTFPQILGVANEMLFCGRKLTAQEACSRGLVSQVFWPTTFSQEVMLRVKEMASCSAVVLEESKCLVRSFLKSVLEEVNEKECVMLKQLWSSSKGLDSLFSYLQDKIYEV

SEQ ID NO: 1079 - DNA, 127487 bp, Homo sapiens
aattactgcaagtaaaatatctaacatgtgcagacagcaaacagctagcacatgacagtgattagtttcttagcactcttattctgtcattggttgttcttagtagcactgggatttttgtacttcttgttttggtcaagaagtgggggcactgagaaggaagcccctaactgctggggaggagctgacattttcctggggtcttggcggaaatgtgtttactgcacttagggtctctccaggatgagctcattattttctctctgtagccacttccttataatgaaatgatatgggttctttctggttattttagtctattcccttatttaagataagttaccccacttgtgactctaaagaaagcctttcagcaaccacacatgctcaatttctgaagcggacggctctcagggtatatttttaaaccagaaacaacattacaagtggtagcaggattcccaggccagcctactgaaatcttcactcactaatgctgctgaatgaaagtaataataagtggcattatcagctgctgcctacactcatttatacattggtccaagaggaaaatgcaccctgaatcccaggaagaaatgccaggagcatgttttcccagcagcaacatcttgtttcagaagccacgttgaagggattaatggggatggatactcctgagcaaaataccctcaacttttaaagagttgtcagcagagaacagtgtccttgctctgtagacgagcataccctcctttctagagcatttcctgttggagtcaaatgacactgatgacaaggtttgtcagaggcatttgtgagaataggttgtttttgctctacctggtcattggatactacatggtgactgttcacagtcatggcagggattgacatcaaatctgcggggcaaaacccagtgcctagtttttgtctctttgcttccttgatgttctggcatttagagtgccgatgactataggtgctttccaggattcagcacggaatccaggcatgtccacagagaggggagtcatgaggggaactggaagaagggccctctgagcaagtgttcccctcctggatctgtgtggatattgtgtagtttcagggcccgagagatggctcaaattcttatgttcccagtttcattctctacttgcccatttctgcctaaatattatttgctcgaccactaaaggctggtggctttacagtgtcaaggcatgggagaggggacactgttgggaaatgagccagccacagggaatatcaatgatagatttgaatcccttcccagatgatcagggtttgggtacagaggagggcctttggcctctctatgccaggggagggccagggttggacagcaggtagccaaggcaggtcccaacaatgtctttggtacccccttgggctgattctgttgtcatcatccctgtgtggacagacacgggctgtgaacaaggcacttcctgtcttcatgactacatagtgtgaagcttggtggcgacagcctccttgtttcctgccactgtgtctgggttcacagtagagaggacaagacataggggttcagaattggggtctgggtggccttgttttctcctgggcaacccaaggtacagatacttgtttgtctcaattctaagttgttggctaggccccatgtgatggaagcaggaactgcctgcagagctgaaaattatctagtgattctcaaaatttagtgcacacaaatgacgaggggtcttgttaaaatgaacccctattcctccatgatgatgtagaaaattaaaatgatgaagatcatgatgatcctggcttgtgtcaagcccctaccctgtgctgagtgcactcacttaatacagcaacttgtgggtcattcgtgttcctagtcccatttacaaatggagaaacggaggcactgagcagttagaagacttgctcaaggcccacacagattcctgctcccagcctcttccggggcctgggaatcttcagttttacaggtacctctggggatcctcagactccagtttgagaaacattgcctttgcattcacgggggtcagtgactgtgtctttcttgctcagcactctatctctagggctttgcattggccaggcacgtaacaggtgttcagtacttgctgaaggaatgaatgagtaatgttcgcttccaaggagtccctggggaatctcaggagctgctgcccaattctctgggagcgttaagtcgtcaagcccagtattcatgccctagttctgacaactttggatttactgccaagaacaattctatctggtttcctggttctgctctctggatccctacattgttccctggctctaagtccttccctccttagtggcctccctgtgtctctagaccccaggcgctcccctgctcttgtcagtacctcttttagggactgggattctgtctccaacagcggtgtggctgctgggcaggatttccggatgctgccctctggcccattgttctgggttctccatcccactatccacgtgtctgttgggacaccacctaccatctactgctgtggccttgagtgtcaggttacacttgccagactggacttccagctccttcagctgcattctttttccatagtggccaattctagctcctgagcctggctgccatccagcttgccttgtcacggagcagtaaatcagctctgttttaatatagccaggtgatgcagatcttaggcatcagagtgggcaggcttgggttcaacttttggctcttagggtgagcactttaattctcacagcctcagtttccacacctgtaaattaggtatgatagtcctaacctccccttcagtgggttgatgtgaggattaaatgggattgtgcacataaggtaatagttcagttttaactattatgtgagtttgccatccatctttaaacaagtaatgaattttattttaagatgattttgacaatgaagattttagattaatattttacttcaaattggtccttcaattttgtgtgaagacaaaacaaaactcacttctcactccctatgcagcctggtatagcagaaagagcacgggctttggagacagtcttaggttttgttcttgccttggtcatgtggcctttggactctgatttaacccttctgaacctcagttgctacatctgtaaagtagagataatagcccctcctgggtttgtcaggatgattggtaactgcttgagaaagcacccagcgtgagacagcagatgcacactgaatgtgcctcacagcatccttgaccttgcaagtggagaaacttattagaaacagacatgcctgctcagtgtgccctacttttgcttccacgaaccatgtgggataactgttctaggaactttgtcacattttgcatgccagggaatttctagcatatgatggggagtcctcctggcttcagtatttgctttgcacacatgcaattagttaatcatttattttaattatttatttcctgtctgccttttacatatcctggccaacttcccaaggacaggggccttgtctgtccacttcactgctccatgcccctagcagatctcatgaatacttgttgcctcccagatcgtggaggagactggagaaggtgtctggttcagtctccagtttctctcaggggttttctcttcatggttcctaaagaggtaaagcagtcttcaccctagtgaaatctttggaagaggactgggggctgtcatttgccccagctcaggttacctctgtctccatccaccttccctggtggcagtggctgtgttcagtatgttgtctttgaagtttcttactttattgccaccaggatatccagccccctgtagccatgttgctatctttttgtaagaataataatgatgtaggaaagagaactggtgataattcaagatcgtcatagaggacatacaaggcagtctaggactctgggtagctcctgaaggtgaagctgctgggcctaaagttgaatagtaagaatggctagtcaccacactgtgtgtcagcagggctgtctccatccatccatccatccatccatccatccatccatccatctatcgatccagtccacccatccattcattcatccctccatccatttgtcaacccaatcattcacccatccatttatccatttaatcatccatctatccatccatccgtgcatccatccatccatccatccatccatccatccatcaattgaatcatccattcatctaatcatctatccactcatccatctgcccatccatccattatctatccattcatctgtctatccatctgtccattcaatcatccatccatccatccatccatccagtcatccatccatccatacatacattacatacatcatctatccattcatccatctattcagccattcattcagtcacccctccattatcatccatccagtcatctggtcatccagtcatccatctatcatccatccatcgatccatccattatccatccatcactatatctatccattcattcaattacccctctgttatccatccaatcatctattcatccagtcatccatgtatcatccatccatccatccacccatctagccattcatcatctatccattgatccatctgtctgtccattcattcagtcatctatccattatcatccatttagtcatctattcatccagtcatccatttatcatccatccatccctccatccacccacccattgttcatccagctatccgtccattcatccatccatgcatccatccatcgacctacccatccacccatctatccatccacccacccactcattcatctacccagccatccagtatgtcaggagctgtggtaagtcttggcatatagtgtgagcaaaaccagacatgtatcctgctcttgtgatacacattaatcaagtagtcctataaaggatgtataattatgatgtaagtacttggaaggaaatagcatatatgaggaatcttagtgtggggagccacagaggaggcttctctttgatgaagtgatatttgagctgagataagaatgaggagtgaacagtcactgaattccttttatgtaccaggccttgttacaattatttttacctgatttgcatggactgacttttcatccttataatgatcccatgaaggaggaatgattatcatccccatgaggaactgaggcataaagagatttagctctctgcccaagggcgtaaccacaggtcggcgacagagctgggttttgggcttaggaagtctggcttagaatctacttcttcttccatctaggggtgggtaggagttagaggaagagggatggggaatgaaaggactttccagggcacaagggccaggcactgaggtgaggtttggggccatggatgattccatagagtggctgcagggcagagagtgaggaggagatggaaggtgaaggggcaggaagtgcaggtagataccaaactgtgcagggcttatacaccattttaagggttttacatgttctcatttgagcaatggagggttttaaacagggagagggagttggggacacaatcagattttcattatgaaaaaaaaaattcctctggaggcaatgtgagagtggaggaaagggaggccggaggggtgcagagattttcctttggaggctgctatgagagctggtgtcccacagcagggcagtgccactggagaaccatgagtgtctgtaaatgtcttgcaaagacattcaggaggtaaaattgcaaatcttggaagtggaggtaaggatgagggccctctggttgtcagaatggctcctcgccttggataactggattagttggggtattgttggtggttatggtcttccagagccctcaatcattgttgactatggtgggatcatgactccgggtcccacaaggattcctgtatcctcaggccagtgccaaggacacagaactgtatcatgtgctgtggagcccacgtcagtgcctgagccagacacaacatttcttcctctttgctgacctgacccacatggccattgttagatccatggcttgggtcgaagttctgcttgtgtaccgtactgcagttacacttactttgatctcatctccagttgctcctccagatgagtaaggcatgtccgctcacttgcatgagcttagttaccctgtcagtgtctgttgatgtttctctctggggattctgtctctgatccttagtgactccacagctctggtcatggtctgaggctttgactacatcctacttggggggacagatggaaacaccttttaatcctgctcgagaaatctgcctggccactaaaggagctttgtaaatgctcacctttcatttgatctccaaaaatggagcttttggtgaaacacgttggtagtttatttttgggtaatttatcctgtcactgagcaaccctcaggagccttggagctagttggattgagcgtagaatgcagagatatttcttgtcagggttccaggatggcattgatgtaaggtatgctgggattttatggggtaggagcagagaaagttagggtcggggatagggtcattggctttattgaggtgaccataacttgtggcaaatttaggaagtcttacgtcttgcaggagacacaacaacagatatataaatagtgagtaaccagccaggtgggcagcagcctcttgatttattttaaatttttttatttttcccgtttatttttagttgacatatagtaattgtacatatttatgggatacacagtgatatttctatatgtgtatacaatgtatagcaatcaaataaggttaattagcatgtccttacctcaaacatttatcatttcttcgtgtggggaacattcaaaatcttctcttgcagctttttttttcttgatttattggtgttaggtagtaagaacctaaaaagtatctgatggtacaggtatcccccagcttgcagtttaggggataccaggatggaagcttagtgtcaagggtcaagctaaggggtctgggtcgtgagactgggacagtgcttaagttccagtattccagtttacatttgaatatataaatattccaaaccacctataaattagtagtgttaaaaaatttttaatgctcacaggttttgagggtcaggaatttagataggcaacgtgggaatggcttgtctttcctccacaatgttcggcacctctgctgggaagacctgaaggctggcagctgacccgtctggaagcacattcattctgacatctgctgtttgatcctggctcttgactggggcctgagctatgttgtcggttggcacacctgcatgtagtctctccgtgagggcttgcttgggcttcctcacagcatggctcctgagttccaagaatgggcatcccaggagagcagagtggaaatgaatgtcacttttatgatatagccatagaagtcacatagggtcacttccctatggccacgacagtctcaaatgtacacccagttcaaggggagggggcatagaccctaccagttgatgggaagcggagcaaggtcacattattagaagacaggagatcttaatgtgttcatctgtgcaaaatacccacacccagccataggatggtagagaagattgtgttgaggccggtcatcccccaccgaggaatctttgattagagctcatcaatggttcagagggacctttggtgctctgggctaagctttaatatcccaatggaacatcctgaacagtaacctatggctgtggtgacagtgcatctgaaaggccatttgatttaactaaaaaatgctaccagtcttctggaggtgtgtctacaaatggcatgtgacaatctgattgagtctcttgaatgattgcagacttctcccacaatgcactgttctcagagcctctcacagcttgttttgtaacttcatccagctacatatttatccgtgcatttatctttccagccacctagcgcttattaaatgcctgcagtgtagcagacattgcacagggcattatgagcaggaggagaggtagaaaaagccatagactgcagcagatcatgggccataccgtcaaggaacgcagtctctgaagggatattcttgtataagtaagcagggctgctgaggaccttggaacacctcttgtctgcagctgaaaacaatgagcgaagccacaacctggacctggagtgcatttgacttcggacatctgtgtgcctctcctccttcctcttgtcccttctgttgggtactagcaggaagtccacatttgctatcaaggaagctggtacccctttgggctgggctttactaagcttgcaacacccaggggatataaaattcagagccggtcatgcatcttacatacatcagatgaaaggaagcagatatcttatgtctgatggcattgggacacagtcctttttgttgactgcattgtctttaagccatgcatttcccattcatcccagagctgtacactgtagcttagggctgtgttacccataggcaccttttgggggccattgtggtttggttttcctttccaagcacctcgcagagacctatggagtccaccttctttctgcctccagccacccacttctcccacacggtggaaggagacgcccctgccccatcctgctgctgggtttgggctcatttttgcctcattcacatctgagagggttcagtttcttgctgtggtggtgaggaaacagggagatgtgaggcgcagccgacatggagagcagccagggaccagcaatgttgtgacattgacgaatagaccaggagagacttgtaagggtacacaaaggacaccaggcagggatagtttgcactgggggtcttatgcatggtctccaggtgatccagtggctacgtttcagggactctctggacattattttaaaacatacgcaaatttaattgcattcagttaaatcacagtgagcagtggtttggagatatatatatatatatatatatatatacacacacagacacaaagacacatatatatacacacatgtatatacacatatatgtacacacatatatatacacatatatacacatatatacacatatatatacacacacatctatatacacacatctatacacacacatctatatacacacatatatatacacacatatatatacacacatatatacacacatatatatacatacatatatatatgtgtatacacatatatatacacacacatatatatgggtgtccttctcccctgtcggttggataatggataattcagggtcccgttgacgtctctattccgcagtgccatactgagtgtggtcagccagggcattatgctcttgctaggtacatcagacaagggcccaggattgggagtacaggtggcaggagtgtcccttgaaacactatgcttcagatttactgagtatttattaagcgcctcttagggccaggtgtgttgccttttcaaacatttaatacttagaacaaccattggagacagactgttatccctacatttctgaagatgaaaggaaggctcagagaggtagaggaatttgctgtgggtcacacagcatgtagctcaaattaaaaatcagagctgtcaggatccaaaccttgagctctcttccactttgcatcctgcgtgttcagaggaggagaaagcttttgcgtatgggaaatgtcaactcttttattaacttcaagtgttaataaaaacaggacgctctgttaagcactcaaagcagtccccacctttgccccctcccaggtgtgcatgcagccctccacaagctgtcaacgtctgcttccctgcctgggagattgggctgacttggagcttctgacacaaatggttcaagatacgtactttatattgttcacagaatctattgggcggttgattttgttaacgtgaaaatgccccacttcttgttggccatctgctttgtccagaaagttgtcttcctggtaacagcgccgcttgaaacaaatcctcccacctggttttcacccaataacacagcctgcgtgcaagcactgtccagtttgccagtcgcgtagcacaacctttactttccattggtatgttttgccctgcatgtttgtgagttgcaaagggactattgtttccatatttacagcaagcagcagggctgcaaattagttttagtgacaaactgaagattaccagctgtagttcaggattcagatttgtactgttacaaaaatatgtattcatgaaactaaaatttcaaattacttccttcacatctcgaaataaatactgtgctgggtatatgatatgcagtgaagaactatttctgatttttaacaaaaccgaaaattagcatattcaaaacacttcttggtgacttagcttttaaaaaaatttaaacacagttctctgtgtgtatgtgtgtgtgtgtgtgtaagcagtattataacattaagggattttttcaagatgtacaatagatcaccttcaatcctatcgtgacaatacaactaaaatcattattgtcctctgtgtccttgttttcatacagttaacctgtttacacacatttttattttctattcactgaacaatatactgtagttatttactacttggttacatagtcttttcagttaaaatgtttgctggctttgcacacatgcacacaaacacacgcacatccacgtcagtgtcacaatcaacactttagtgcacatcatctttctgttttcttattcaattatgtccttagagtaaattctgtcgaattacttggttcaaagatatggacataacttggtaaatattgttatgtgactgctggaagggttgtaccaatttgtagtactgtgtacttcctctaaaaattaaataagccatggaagaacatttagcagtaagttctgctataatatgacttgagcattcttaaaaatcagcctgccaggccaggcatggtggctcacacctgtaatcccagtgctttgggaggccgaggcgggaggatcacgaggtcaggagttcgagaccagcctggccaacatggcgaaatccccgtctgtactaaaaatacaaaaattagccaggcgtggtggcacgtgcctgtaatcccagctactcaggaggctgaagcaggagaatcacttgaaacaggaaggcggaggttgcagtcagccgagatagcaccaccgcactccaggctgggcgaaagagtgaaactccatgttaaaaaaaaaaaaaaatcagcctgctgtccataatcatgtaattaaaaaatagggcttacggaaaaagtaggattggggtacaaaatcaaaaatgttgtcagtggctcagtgaaaaaagggatggtagtacagttttgcacatgcaagatggttaagaaatctataattcctacaataaatgtggcactttaccttaaaaaagactgaaagttggcctgtggaagtagatgtgagaagggctagtaattattgtggggttgtgaaataggtttttctgaaagttgtgcacaagtgtggtccagaacacactcgcttggtgaactgggggagctcatgggtgtttgaggaagtgtgtgtgtgtgtgtgtgtgtgtgtgtgtgtgtgtgtctgtttattcctgcatggctcagtttacttaggtgcagctttagctttctgcattcatctagtgcttctcgtggacgaaattgtgcacaagaaaatgcaaaatttgcgttatgctcaaattattccctgatatataaattgtgttggaacaaatttgtattttcttttttttttttttttgaaatggagtctcgctatgttgcctaggctggagtgcaatggcacgatcttggctcactgcaacctccactccccgggttcaagtgattctcttgcctcagtctcctgagtagctggggctacaggtgcacgccaccacacccagctaatttttgtatttgtagtggagacggggtttcgccatgttggccagggtggtcttgatctgttgacttcgtgatctgcccacctcggcctcccaaagtgctgggattataggcgtgagccaccaggcctggctaaatttgtattttcaaaacaggagaaggcagtcctgcctgtgcttttctatttgtatttcttcttgtctgactggcgccttacgcttctgttcaatttgcaaacaggagctctgctgccagaagaacatttttattttcggaatgtagataggtaattgcctcatgttgctttataataagcaattttttatatctttaaatattttctatgaggattgcagcaactttataataaagatttcatcattaccagattcctgtctgctctatctcgatgctttggaactgagaacaacctgaactacacaataagcttctagtactttctacatataagtacaaaaaaaaacaaccctgtgtgttttatttatttgttcatttttaaaaggaaatttgactaccagctgatatttattgattgcctcttgggtacagtgacgccctttgcagccaggtgggacaggttgagttttctccttgacagaaatcctttctgagcctcatcctcaaaatgggatggggttggcttcttaatagggagggctgtggctgtaccaagatgtattcgttcattctcataactgctagtaaagcctacccgagactgggtaatttctaaaagaaagaggtttaatggcctcacgtttccacatggctggggaggcctcacaatcatggcagaaggcaaggaggagcaaagtcacgtcttacatgggggtaggcaagagagcttgtgcagaggaactgccctttataagaccatcagatctcctgagacttattcactgtcacaagaagagtatgggaaaaacccacccccgtgattcagttatctccacctggccctgaccttgacacgtggggattattacaattcaaggtgagatttgggtggggacacagccaaaccatatgacaagataatggatttgacgtctccacttcctgttgagtaaatgtgagtttcctcctatccttccatcccagtcctggatttttccttagacctaccatcctctacaacctcctatggggcatgaagggggaaagggcatcatctttgccccacccctaaagagtgtgatcctctgagcctttcttgtagaaatagcatcctgcctttctttctggataaacttaaggtgatctacccttagtaacccaacaccctactggagagaaaaaaacttgtggtttaagaggcatcaatggtctcttactggaattttcccagtgtacagtgatgaaacacttgtgcccttgtattacaggccacttgaagcaccaacccttgacctgagccagggttcagataaactgtattcccctcacttatgaggctgcctctctggatgctggacttggccacacttttacaaacagacacagattctgttaaaaactaggaaaggattatgacttaagcattggatctgaacactcagaaagacaccaccaaagcatctggagtttggtgatgccaacccaaagaagctgcatgttctgacccatttgatgctctgttcccaactggagcatttacagtcaccgaaccagaaggagccctctggaaggatcttgaacaaggatggtcttgttcaaggtttttcacatttatactttcttcttttcttttttttgagacaacatctctctctgtcgcctaggctggagtgcagtggtacgatcgtagcttactgcagctttgatttcccaggttcaagtgatcctcctgcattagcctcccaagtataggacagacacacgccagccccaggatgagttatgttaattttttttgtagagatggggatcttgctgtgttgaccaggctggtcttgaactcctggcctcaagcagtcctgtcatcttggcctcccaaagtgctgagattaccagtgtaagccactgtgcccagctctcacttatttttattgtctaaaaattttctttttttagcatgaaatgcaataccaggtagaaccataatggctatactgaatcctagggggcaggctctgggtgcagggagttggatgtggggtgttcactgcacccccatgctctgaggcgacatcctctgatgccttcatcaatctgtacggcttcccagaacatgggtggaaaatgtctgcttgcattcaagacttttattttatgggcaggcagacaagtctgtaggtgtgattgacctgagtcagttggccgtgtaactgaagagccaggtcttctgatatctacctctgttctcatgaatgagaccggcctatcttctgccttcccgtgatgaagattttccattgtgtactcttgccttgtagactgggaggcagcagtcccaaacctgcctctacttcctttgtttcttcctctttgtctatggtccctggactcaatctcattcttcttggcatttcttgtacacttgtggagcatttctggcacccttgataatcacttttgtgcaggaggaggggatgatttcccctggggctgcccctagcggcttggtggcaactcagtgataattgtttaccagaagccagcctcagtcatgaattccttccaaacattaacttatttgatccctgcaacgtgcaacaatgtgatcatgattcccagtgttcagatgggagaagtggggctcagagaggcaaaaatagtttgatcatggttttatagggtggaggcctagattcaagctgaggtttatcttgtttccgagagcttgagcccttcactgccagcattgagcggatgggtccagcattgccctcctgtttttgagctcacattcttgtgtgagggtggagggcaactcatttttcacaaacctgttgaagttctcgagaggttactggcctgtagccaagggacaactaatggatgtaattgatttatgcctcttaaaatgttttgcagaatttttagtagcttttgatgttggcatgtagtcacttggctggggattaggtgttattttgagggaaagatgcggagtagagaagagtgaacacttttccatcagtcttctacactggatgctaagttccatgagaacagggaccatgtctgtgatgttcagattacacccctctactgccttggagtgtccagcatacggtagatgctcaatatatgcttttctcccttaataaataaatgggataacttgaagaaagattttatgatgtttatggataaaaagaagagataaactatggaatggagaaattataatatgggggttggcaaactatggccacaggccaaatctggcccaccatttgtttttataaataaagttttattggaacacagccacatttgtttatgtattgtctgtggctgtgtttgcatgacaagggcagatttgagtagttgcaacagagaccatgtggccttcaaagcctaaaatatttaccatctgggccttcacaaaaacgtttgttgaccattggtttataataatgccagttctactgaaagaaatgtggaaaatattcataatagcacaaaggcctgcaacagatctttgttggaataggaagaacagattctgccaggggacctgcctgcgttccctcagtgtgccttctacagctgggctaaagcttctagaacattcctgaaagcagatgggctccctagaaggaagcagtgggttcttgtagaggccttggcaggtggaggagttcttggggtcagtaagtttgcatctggatgacattaggactctagcatcgctcatagttcttcaaaagtggcctttggccagagtgaagacaggaatctccctgcccgctttcccagccacctgaccctgagggacggtcttacctgtggaagactgcaaagggagaaccaggctgaaaggaggtgttagcagccatcctgctagaggaaactgatgccacctctggtcccagatgtttggtgctcccttctgccctggtgggcattcggatctggaccctgtgtctcagagggatggctgagcaataaaggatttcctgaagtcagcgtagacgaagcactggtgagctgttgggatgagtcaaacagagcatctgcccacgaggaactcacctagtgaggtctagctcctagctggacaataagcatgtcaagcctggaccagggagcccctaccttggccaacttctccacctgccatacccctgggtggcttattttgcacttaggatcaggatgagatcagggttcttaacttgccatagagacccagcagagtctgttttcttactctcatctctcaacatgccccagtcccttttggcttcagccacgtggcctttctctgttactcacgctgaccactggccacattcctccttggttcagagcatttgcacattctcttccctctaactggaactgccttctccctgagctcctcccgcatgccctgttccaatcagtggcagctcttccttccattctgaatgtcacttcctccaaggagtcttccctgactgccaagaccaggttggctaccttgtacacaccggtggtgaacgtctttccttttgtctagagcacttatctcagtttgctattaatgttggttggtgactttatgtattagaagctggctgtccccatggactgtgtgcttcatgagcatgagggccacatttgtttttattcaccgttgcacctctggtgtctcctgcagtgcctggcatgtgatgagcacttgataagcatttgttgaatgatgatcaagttccatctttggtattggttctgagagaatagctgtggctgcctggagtgttgtatttaaaagaagaagaagaatatcaatttgccaagtgcttctgtgtaaattctgtgctatgcattttgagttgatctgggctgattaggagtgggtgctgtggttgattagcagtgtctggcttggatgagggtgcgaaaggaaagaagggagttggttaatgaggtttcagaaagcaccatctaatgtacctcactgacctcctaggacaaacagacattttgctctactcaggtagtggagtttttactggtcaccttcacctcccaatcttccagcaacatgcacacttccgctatcctgtaactcaattgttggcctgtgtgtactttggaattcagtatgcagtgtggtgatgggcgcacccaccctgcgcagctgggcaagagaagggaggtggctgctctgcttacctgggtgcaaagtttgatgctaacgtggctccgcaggtgaggcttgtcatccaagctcaggcaaggccaggtgtggtctggaatcagaggtcaagagggcaggaccctgcagtaggggtcctggtaaccagcaggacttaggggagcctgtacccaggaatagccgtggagaagcccctgaccaccaggtgcggttctgggaggggctgggtcacttgtccctctccttgagccagagtgtgatgcatggtaaccagattggttgctagagcaccccacagggaggccctgtggcctgagccaccacagggtgatggggatacctgctgtaagggcagagtggctgggtgggcattgactcatgggcaccagctttggtctagtgcacattagagaaagtccagggaccagtgacgaggttggtagctctagtccaatcctgaatctggggataagcctgaggctttctgtgttcattcattcatctagcattgactgtacctctaccatgtgacaagccgtggggttcacagtcgaaaaaaagagcctctacaatcaaggaggccacagtctagttgtggaggtaaatcaacctttaaaatataatgctattcacatatatttatctgttcatgaaaggaaactttgtaaatacaaaagagtataaagaagataattaacactaatcttgctccctggagataacattcttgttaacatctccacctctctttttgcccaggtgtgtgtgtatgtgcatattctacatggttgagataattctgttaatggggtttcctatttttattaacatttccttcttatctttttttcctagattcatgtgtgtatatatattccacatgattgagctaatactctaataaacttttatgtcaagttatatcagttatggacttagtggcttaaagcaataacaactgattatttcttaggcttctgtgggtgagctctgttgatttcatctgggctcactcatgcagctgggatggaaagtccaagatggcctcacccacatttctggcgtgcagtgctggctgttggctgcggcattttgtgtctactcatcctccaggaggccaggctagcctcctaatattgtggccttacctgtccacagggtcttactctgtcacccaggctggaatgcagtggtacgatcatagcccactgcaaccttgccttcctgggctcaagcgatcttccagcctcagcctcccgagtagctgggagtacagacatgagccaccacacccagctaatttttaaattttttgtagagatgggttgtcactctgttgcgcaggatggtctgaaactcctggcctcaaacaatcctcctgctttggtctcccagagtgctgaattatagacgtgagccctcatgtccagacctgtctgcttttcctaatgatattcctgagatctttatatatttcttgattatttttactattttacttcatgccacttaatttttttctattttatacactttttttcttgatttcttctaaaaaatgggatacatgtgcagaacgtgcttttctgagcaaaatattattttgaacatgggatgtctttcaatgaaaaatgagatggctgtctacctctgtcttgttttcttctaagtttttatagttttgtgtgtgtgtgtgtgtgtgtgtgtgtgtgtgtgttttaggccttctgactcttggaacctcttggaattaattttcagaaaacccccaaactctgattcctctactgtgaagtgggggtttgtttctcactccacattcctgtataattgccccaatcccacttatgcaataattctgctatttggcactgatatttgatgctactttgtttccgattttatctcctaatatatgaagggatgttttcaggcttgctttcttgctcagttgatttatttttcctgtcctaatgctacactcacaagtatagtggctttatattctacttgagtatgttattgtagaagtgccttctcattattcttctttttcaaaaatctcttggctatttttatttaattctcccaaaggtacttgagaaccattttgtaaagttctgaaaatgaactcattgggactttgattgtaaactgcgttacatttatcgatcagtttgttgcaaaccaacttttaatatgtgaagacttcccatccagaaacatggtacatacagctccattcatttcagccctttaaaacatctcagtagaattttgttgtttatcttcttgtagttttccaatatttcttgtgaaagttaacgtttgcaattcggtgtttttttggttgttttttggaatgtgctcatttttccccatgatatgttccagttggtcatttttaaaaacagaaatcaaattaatttaaaaaatatttttattgatttttaaatggaatagatactatgtaaataatgttcattgaaaaaaagctttacagaagaatttgaatagaaatgaaagaccttctttgtggcctcttcccctgcatccactccctgccttagagaaaaccattgttaataattaggcaataaccatagaagattaacagtgaattattccagacctttatatatttgcatatgcatattttgacataaatgggatcatactgtacattaagacatatagctctgtcttgatctatgtagaggttctactttgatagagtccctgtttattgcttttttccctttagaattggttgtatgcggatggatactcaaaagtcaaatggctggttcaagggtttgtgcagatttttttcccagtggcttaagactgcaggggtttatttctcactcatgctacctgtccaacagtgtttagtgggatcttctgcccgccgagtccctcagagacccaggctgctgctgaaggcttaactgtttcttagctgcacggcgttacaactcatggcctgctctgttgctgtggcagggaagacaacaaataggaaattaaacctttctgttcagaggtgatacatttcttctgtttcctgcctactggcgagagaaagctagcatgatgtgaacctatgtactatgtgtgggaggaggaggagagaaggttgtacattttaatttgcatagatatctgttaaattaccttccctaaagggtatatccatttacatatgctaagaacatatatagctattcgtatgcccacatccttgccaacatagggtattagcaaccttttaaaattttgctgatctttctcactgttttaattttcatttccctgattagtgatgagcttaaccctctttctaatatgttgatagccatttttatttatttgaatttgtatttcttattctgcttctttgcccatttttaacttctttttcttaatcgactttgaagttccttacatattctggatgttactcttttgttgcaaatgtgaatattttctcagtccattgtcatttaattttatttttgatgtcttttatgaaaggaaaaattttaattatagtttagtgaaatttagcactcttcatggccattagatttttgtttcagtgaccttctccactgtaagtcttaaaacgcattttttgtgtttgatatgttcttagatttttgtttaactttctaatttatctggaattttgcagaggcactgtgatttctccaactttgctctttttaaaaattgttttggctggccgcagtggctcacgcctgtaatcccagcactttgggaggccgaggcgggcggatcatgaggtcaggagatcgagaccatcctggctaacatggtgaaaccccgtctctactaaaaaatcagccaggcgtggttgcaggcacctgtagtcccagctactcgggaggctgaggcaggagagtggtgtgaatcagggaggcggggcttgcggtgagcggagatcgcgccactgcactccggcctgggcgacagagcgagactccgtctcaaaaaaaaaaaaaaaaattgttttggtcattctaattatttaccttttccacatacctttcaaccttttaagaaaagtttttgacacataataattatacatatttatggagtatagtatatttcaatacatatagataatgtgtaatgatcaaatcagggtaattagcatatccatcccttcaaacatttgtcatttctttgtgttgagaatagtaaaaatcctcttttctagttatttgaaaatacacaataaaattttgttaactatattcaccttacagtgctgtagaacattaaaacttaatccttctgtttagctgtgattttgtatttattaactaacctctccctatcctctgttcgtgctattcttcacagcctctagtaactactgttctactctctacttctatgagatcaacttttttagcttccacgtatgagtgagtactagtggtatttgtatttctatgcctggcttatttcacttaacacaatgtccagcaggctcgtgcatgttgccacaagtgatagaatctcatacttttttatggctaaatagtattgcattgtatataaatatgtatatcatattttctttatccattcatctgttgatggacacttaggttggttctatatcttgactattatgaatagtgctgcagtaaacatgagagtacaggtatatcttagacatactgattttccttcctttggatatatacccagtagtgggttattgaatcatatgatattaaatttttagtttttttgaggaacctcctttctattttccatgtctttactaatttacattcccaccaacagtttataaagttctcttttctccacatccttgccagcatttgttagtttttgtttttttgataatagccattctacctggggtgagatgttatctcattgtggttttgatttgcattttcctggtgattagtgatggtgagcattttttcatattgtattagttcattctcacactgctataaagaagtacctgagactgcataacttgaaaagagttttaattggttgatggttctgcaggctctacaggaagcaaagtggcttctgcttgggaggaggcctcaggaaacttacaatcatggcagaaggtgaaggggaagaagacacatcttatatggcaggagcagaagtaagagagaggaggagagatgctacatactttgaaacaatcagatcttgtgagaacttactatacagtaccaagggaggatggcagtttattcatgagaactgtgcccccataatccaatcacgtcctaccaagccccacctctaacactggggattataattcagcatgagatttgggcaaggacacagatccaaaccgtatcacatatgcttattggccatttgtatattgtcttttgagaaatgtcttttcagatcattggcccattttttaattcagctatttggttttttgctcttgtgttgagttccttgtatattctggatattaatcccttgtcaaatgcataatttgcaaatattttgtcctattctgcgggttatttgttcattctgttgattgttttctttgcagtacgtacagaagctttttagtttgacataatcctgtctgtttttgcttttgttgcctgtgctttcgaggtcttagccatgaaatcttgtgtctatttttatgccagtactatactgttttggttactacagatttttagtatattttgaagtcaggtagtatgatgcctccagctttgtttcttttgctcaggataactttgactatttgggatcttttgtgcttccatatgaattttaggatttttttttctatttctgtgcagaatgtcattggtatttttatagggattgcactgactttgcagatcatttcggctagtatggccattttaacaatattcttccaatccatgaacatgggatgtatttccatttttttaatcttatctttaattttttccaccaatgttttattctttccattgtagagatctttcatctccttggttaaatttattcctaggtattttatgtttttgtagctactgtaaatgggatttctttttcagctagtttgttacgattgtatagaaatgtgacttttttgttgattttgtatcctgcaactttactgaatcatcagttctaagaggtttttggtggagtctttagatttatatatatataagatcatgttgtgtgcaaacaaggataatttgacttccttgtttccagtttgcatgccccttatttctttatcttgtgaaatttccctggctaggacttccaatactatgttgagtaagagtggtgaaagtgtgcctccttgtcttgttccagttcttagaggaaaagcttccaacttttcctgattcagtgtgatgttggctgtgggtttgtcagatatggcctttataatgttgaggaacgttccttgtctacctgatttgttgagagtttttatcatgatgagatgctgaattttattaaatgctttctctgtatccattgggatgattttatggtttttgtctttcattcttaatgtgatgtattacatttattttctaatgtatgttgagccatatgtgaatcactgggataaatcccacttgattatggtgtactatgttgttgatgtgttgttggattagtttgcttgtattctttgttgaggatttttgcatctacgttcatcagggatgttggccggtagttttctttttcttgtgtccttgtttgcttttggtgtcaagatgacactggcctcatagaatgagtttggaataattccctccccttcagtttatcattttactttacttattttttttttagaaacaaaatatcactatgttgttcaggccggagtgtaatggctattcacagatgcaatcatagggcactgcaaccttgaactcctgacttcaggtgattctctcacttccacctccagaggagctgggtctctaagtgcatgacaccatgcctgggccctcctcttcagatttttggaagacttggagaagaattagttttagagtccttctttaaaagtttggtagaattcagcagtaaagccatcctgttctggacttttctttgttgggaggctttttttttttattactcttccatcttgttacttgttaattggtctattcaggtttcctatttctattttgtatttcctgtttaatcttggtaggttgtatgtgtccaggaatgtattcattttgtctaggctttccaatttgttggcatatagttgtttgtaacagtctctaagaattttttgtatttcgataatatcagttgtaatgtcttcttttttgtttgtgattttatttgtgtcttctctattttttacttagtctagctaatggtttgttgattttatatttaaaaaaaactgtattgttgaccttttgtattttttagtccctatttctgccctcatctttattatttctttttgtctattgagttcggttttttcttgcttttctagttccttgagatgtatcattaggtcatttgaaatctttctgcttttttgatgtagatgttcattgctattaccttctctcttagtactgcttttctatatcccataggttttggtatgttgtgtttctgttttcatttgtttcaagaaatttttaagttcccttcttaatttcttcactgactcattggttgttaaggaacgcattgcttaatttcgattatttgtacagtttcaaggtttttcttgttattgatttctagttttatttcattgtggtcagaaaagataattgatatgatttcaatttttaaagcatttgtagagacttttgtggcatgatgtatggtctatcctggagaatgcttcatgtgctaatgagaagaatatgcgttctgcagcagttgattgaaaccttctataaatgtctggtaggttcatttggtctgtagtggaggttaaagctgatgtttgttgattttctgcctgcttgatctgtctcgtgctgagagtggtgtgttgaaggtctcaactaatattgtattgaggtctttccctccttttagatctaataatatttgctttatgtatctgggtgctcctgtgttgggtacatacatatttacaattgtaatttccttttgctgaattgatccctttatcattatataatgacctcctttattgctttttacagtttttaaacttaaggtctattttatctgctataaatataaccacttctgctcatttttggtttctgtttgtgtagtgtatctttttccatcccttcactttcaatctgtttgtgtctttacaggtgaagtgaatttcttataggcagcatgtagttgggtattgcttttttagttcattcagtcattctttatcttttaactgggaaatttaatccatttacattcaatgttattattgataggttaggacttactcttgtcatttgctttgtggttgttttgtatagcctttgtttctttcttccgcttttattatttatctttggttttgtggttttgtatagtgataagtgttggcaaactttttcttgggccagagtaagtatttgtgagctgaacactctgtgtgacaacaactcatttctactgttgtattgtgaaagcagccacagatattacatagatgcatggacatgggtgtgtaccaataaaactttacttccaaaaacaaacatctggccagatttggcctgcaggccataattggctaactgctgattaattcacctgtttatatcagatggactcttgaatatttattcttcgggttataattctttgggatatatattctttgggttactcttattatcaggagcatgttgcttaattttgttctgttactcagattgttccagttttggccatcgggagctctttcatttggcccttttgatatattcccgtcattgtgggtttatttatttatttggagcactttcataccttttagcactctcagatcttctagggtcatcttgtatgttttctgtcccagccctagagttaggcattttcctagggagccctagtttttttcattggagagtgatattaagaaaccatgatctgtgttgctggatgtgctcattgatagtagggtgtgactgcttcttggtcttctcagaggaaagatgtaggaaatatgtgtgtgctctaactcatgtatacatatatttatatttccatgtttatatgtgtaaatgtattaaagtaaacatgagtttatactgatatctcttactccgattcagtattccagggtttattctaatcttctcctttagcttatttatagctttttttttaagccagtgagaaacctggctttcatttcctatcaattatttacatatttgctcaaacctagtgtatgcttaaggtcattttttaaattctttgtacctctgcaaaaaacaattttaccaactagagcaggggttcctaaccccctggttatggactggtaccaggccgtggcctgttaggaaccgggccacacagcaggaggtgagtggtgggtaagggagcattaccacctgagctccgcctcctgccagatcagcagtggcattagattctcataggagtacgaaccctcttgtgaactgcgcatgcaagggatttgggttgcgtgtttcttatgagaatctaactaatgcctgatgatctgaggtggaacagtttcatcctaaaaccattccgcccgtcgtggaaaaattgtcttccatgagactggtccttggtgccaaaaaggttggggactgctgaactagaatacagtatttgtatactttgtctttattttgtccaattaaaacacagttttctaaagttacttgggtcagctccttttccctgtctcttgtatttaggttgtatcatacatctgtaatacagtgagattcatttgtcactggatgcattccatcctgggagcctctgacaccttggttgatttttttttaaaagtgcgtacagaaaaggtcactctttttttgtggtctacagctctgtggtttttgacaaatgtacagtcatgaatccacccccataggaccacgcagaacagtttaatcacctaaagattcccttgtgtagccgattggtaatcatcccctcttcttctggtccttggcacctgaatgtaagattcatttatgttgctgtaccaagtaatagtttgttccttttaatttctgagtggtattctgttatacggatgaacttcagtttgtttatctgttttcttgttgaagaatatagttgtttctagtttttggaaatgacaaattaagcccctgttagtattcacatacagaacttttttttgtaaataatacctttggcctcatttctgctgtcttgtttaatgctttttgtcttttatgctttattacaatttcttttgcaatatagaccttatttccatcttctcatttgatttgaaatgcatatttcctctttttatttctatgtgttttgtgtgtgtcttccaaacaactttattgaggtataacttatttatgattacacacattttcagtgtaaaagtgacttttgacagatgtatacctcaccacgcaaatccaattatagaacatttccatttccccagaaagtttccttatggcctttgcaatcactctcacccccaccccgccatccacccccacacccagcccccactgatctggcttcgatcactatagatgagtttgcctggcatgtagtcttctgagtctggccccttcattcagcataatgcctgtgagtttcttccaaattgttgtgtgtgtcattcctttttattattgagtggtacttctctgcacagatatgctatggtctatttattctgttaaaatacttagatttctccaggttttgtctgttatgagaaaaaatgctctgatcattgatcgtgtcattttatgggcgtgtgttctttcttgaaagtaattgttttgtcaatatacacaaacatgttactctagtgataaaggcagacatcattcagttaagttttcactcttcttcatgtttgaccatttcctatactcattatcttaacttggcatttaaaaatcacattattatagttttgctttctattttcacattatatatgcaagtaatcctttgaaaatcatttaatatttgctttcaatttgtcataattacaatgattacttaagcctcaactccaggtatttatttggtatcattgtatagcattaatcctaatatgtattcttactacaccttctccagttttacgttaaaaatttaggtttaaaattgttctctgaagtacctgtttgagtcatgttttaaatgggcagttcctattttgtcccctaagagatgagttatcttcttcccccgttctcatctgaaggaccacttgggctatagaatagaattcttgagttcagaatatttattgcttcaacaggtgttctggaacataatgttctgaagttggcctgatttttggatgggggagggctgggggatgaggcagataattcagttttttgaaatgaagaagctttgcatggatagaaataaagttgatctattctcaaactctccttcccccgtcagtgaagtcttcttttgacgtgcagacttaggacgtagatttcttctattatgacttgattagcgtttctgccctgtttagatttttttctctttgttggacttagactgggtggatctctattaactcttctaggtatctattctcattttccttagtgctttctttaaaatttctgtgtccttttttcctgctctcttggacagcttttcgagtatgttgtctatgtcgctggtgtgatttcccgcatgttggttctgtcctttcctggttccagcgggaattttattcccttgcttgcgttttctctttgattcctttacatcctttcttatgtaaatgaatcgtttttttcatttcagcttccttctcaacctgttggtttcatttcatcatgtatctcttcttctctctcttttaaaaacatgggtcatattttctgtagtattggaagacacaccacaaatactattcaaaaatatacagtagtactcttcactggtgtgattgtactgggaacattttagttatgatcatgttcttatgttttaaaaatttttatgaccatgttgtgtgatgatgctgctattactaattttgtgtgaggtctctctaggcatagtgttttccagcagaatggatatggaaattcctgttggtctctctcaccacttggatgccacagagtcccccagtcagacccttgcccagaatctagcttggtttacatggctctgagccaaacttcttggtctgacagccatttcccttgtgtagttttgctgcactggacgggaaaaacctactgccttctctggctagattagctgaagcaatctaagtcttctggattttaaatagcccatgccaagttgttcccagaacttgccctctttatccttcctgaggacttcataccccaagttgtaaccatggggtgccttcgcccttccgcccccaagggagttgtctcaggatgttgaaaggatgcagaaagaaaggtcttcagggatgtggggtttgaggtacagagttagggaatgaactgtttctggccagggatggctgctctggtatatggatgggcagaggctgtaggcgtggatgtcttctttctctgttcttttttttttggccttgctttttgctcccagagaccaagacatgtactagtaaacccacaatttctcaatccagtgccatgtgttgggaagatatcccttcagcagtctgcaaaatctttgattgtaatcctgggttccagagcaattgtaattttatacattgtgctggtttggtgggaatctgtggtggggattatgactggtgatgagtctgtttccatttggaccaatgaagaattgaagcagagggagaggaggccctgtggctggcatggtaggggctctaggagaggccagcgcaggaggctaatccgaagtgatggaaagatgcttcaggacttcaaggaaattggcaggagttgaggggaagagcctgaagctgcggatatgctgccagccttggtcaggttggacccactgcacgatgagaggtgtatataatgtggtcgccgagagcatgggatttggagccaagatgcattagaccaagtcttagctcttctgtgcttaccaaagtccataacttctgggtgcctcagttttatcctctatataaaaaataagaaaataaaattacttaccttgctgggttattttggagagttaatgtatagggatcaagtacagcagcagctggcccttagtcatgctgaatcaaggttaggtggtgatggtggtatgttatcagcctgctagtggaaaggctgaggaggagggggtggtctcccttgcttggaaggcccctcactgctccagtccttctcatctctacaggctgagtttgctgtcagtttaaattgtcctttcttggaggagcctttgtgactgttctgtttgaagtaaatccattcccgctgccgttgtttctcacagcaccttcctctttgccatcagagtacgagtccttttttatttctatttatttttttattttttttttatttttgagacagagtcttgctctgtctcctaggctagagtgcagtggtgcgatctcgcctcactgtaacctccgcctcctgggttcaagtgattctcctgtctcagcctctggagtagctgggattacagacatatgccaccacgcccagctaatttttgtattattagtagagatggggtttcaccatgttggccaggctggtttcgaactcctgacctcaggtgatccggccacctcagcctcccaaagtgctgggattacaggcctgagtcaccgtgcctggcccagagtgctttttgtaatttgttactacatattatgttgtgctccttttaaggcctgtgtttctcactagcctgtgagccatgatggcggtctgcgaggtttcttgttgcacactggtgcctcgcgtatcagtgatccttgaagagttattgtatgcgtcacttccgtgaagccgtttccttcctcagtatccgttcctcttgttgctgttccaatggttcatgctttgcttggccctgccctgttctaatagcttctcactggcaagatgtggctaggaactcaggctgttgcagtcagatgaacttgggttcaaatcttggttaaccagctactgactgtgtgatcaagggaaagttacctaccttctctgagcctcagtttcctcccctgtcaaatgagaatgatgtccagctggaaagctgggcataagatgaaatctaacacctgaaagtgatttacacagttcctggaactatgcatgtaccagtcaagatgattgtcatcagtattaatcctactgagacagccatccaggtggcatcctggcactggtaataatagcatcagcatttccctgcctgccacctgcaatagagcagagtctcacattagctgggatcatggagagtaaatgttaatgaatgatttgattgaactctgaggaatagttcagcatctcagattgcttatttttgagaaaagaagctggtgggggtgtgtacacaggattttctaatgtcattcattcattcattcattcattcatatgtgcaaataaagggaagagaattaattattgtttccatttggaaggactgagcttcaggtaaagcaagtggcctgcccaggtagagcgggggcagagcatcaagagacagagctgccaggaccaggggtaccagctctctgttttttgtttgtttttgtttgtttgtttttggtgtgaggagttatgagacagtgcaggaagtttggaggagcttaaaaaggatttcccagagagagaatgttgcagtcatatgcaaggtcaagtcctaaacgacttgggctttttctatcaacagaacaaattacaattcaggttctgtttgaggtgctcctgagaagaggaaaagagtcagaaacctacacaaagatgtatagaagattaggtcctgagagatgccggagatcaaagtatgctggggtatttgggagccagctttcccctgagttttttgtggttattccagtgtttcaggaaaaacagtgttttctgaacctgcaaaaaccttgtgtttgtttgcttttttaaattgggggtgaaacaatgtatataaaagcagttttgtcaactgaagttcatatgtatcggagtcatccattcatcttgtagtgatgcttttcctgtatcttaattctttcagtttttctttattattatatattttaccgatggggacaccaaggccagagaggtggggtgacatgcccaaggtcatacagatagaaaatgacagagccaaggtgtcttcctccacataccaggctattagagatggtcctgttaatactgctcatcattggtattgggttaagtagaaattgttgacaagccacccagtggctttgtgaatgggaccagaggtagaagaactagccttgatgtcccccataaagctacctgtgactctgtgattgcaacctccagtaatttggagggaacaaaactaagctccgcctccaatgtggccccaaatagccatctagaccctgcacccttgctaaccttcagcttttcatgtagcccaactatgcatagccaccttccatgcatggaagcacttatctaagtaggtatactctctcttcttcccatggaggagttgactgttttaaggggtcatattctgaaaggtggaggaacattctgtctttagacaccactaaggtttgtggtcacaggagtctatgcaagattactgtggaatgcaaacgtacatagttgtgtattttccgcaacaaccccaagagataggcgctatacttctgccttgctctatgagtcatctgaggcccaaagaggtttaataacttgctcaagaacacatgataagaggcatagcaggggatttaaaacagatcgttttgttacaaagccctgttcttaaatattttgctaatgccattttgataagtgtcatctattaatctatccatccatttatgaacccacttctgtccccaccttttcatccatcccacatctgtccatccatccatccagccagccagccagccatccatccatctattcatttatttatccatctagtcacccatacatcctaccatccatctatccatctatccagccatctattcatttatttatacatctagtcacccatacatcccaccatccatctatccattcatccattcatccacccacccatccacccatccatccatccacccacccacgcactcatccattgtgttggctatttgtctaacatggtcctccacttcatcctggggaagaaatttctccatcccgggaagtgagcatatattgtctagagctggaggcttccatgagaatacaccacatcccttagctcccaggaaatatctgggcgctgctgctgttcctaggttggtgtcctcacaaatgctgctgtttcaggcaatgtcagattgcttactctctttcctccctcagtaaacctgtagagagtttctccctacaatgttcacaaaaagagcaaagctgcaggctcttccagaaatccttggcgttctgaagcattattacaaaggaatactcagtaactccattccttaacccaaaggttggatattggattagttaggcatgattttactttttcaaaaatgttacagagtttgtgtattatatctaaaaattatctaataaatctaaaagacctgttcccaggacgtttaataaggaaacaaattttgatagccagtttggatggagataaattaattaaggaaacaatttaaattgtctatgaagaggcagtattataaagaggcagtatggtctagttatttgcatatttattaagtgcaaggcaaagaaagtggtttaattattttgcatgacctctgttgtgcaaaagccattgatgagacaatcccacttttcaaagttttttcactttttaggattaaaattctaaacatactaaaattcaaacacgtaaacataaacatccatataaattaccccatgtattcattacccattttcaacaattatcaactatgactgtactcacctttgctcacctgttttatttttctttttgtaagtttcagaggcttattcctgactcgacttaattttattgggtcaaaattccattctagaaaagcatattatattgatattgaagtagaataaacttttgaatataactgcttactttttcattgaaatttagcatttggagggtacaacattgggaattttccaccttcttttaattgaaaaagtttcaagtctacagcaaagttgaaagaatactaaatgaaccctcacatacccttcagttaaatacaacagttattagcatcgagactggcattttccgagtgtatttttccacgggattacataaagacaagggaggttttcttgcctttgaagacatgtagacagtagctcatggctttagggcctgacacataaaggttcaaatcccaccagtatcgcctgcgagctgtgcatggtaggcgagttgccttatatgcaatatcttcatctatcaaatggaaaaataatagtggtgtacacccacagggacatgtgaggtgcatagtaggtactcagcaaatgttacctatctctttgcctcctagctgtgcctctgtgttgcagctgggggagctgtgtggggagagctggacattttcagttcaagtcctttttggtcactgtggaagatttttgcagttaagagagttagtatggcctagtgagtaagagaataagtctgaggtgagagtggttcaaaccccagttctgcccttaccattctggaacttggttaagttacttggtctctctgagccctcgttctctgactgtaaattggggatagaaaaatatttacttcattgagtttttgtccacgagaaaatgagatgggagagtctatgcccagcatttagtatagtgtctggctcataagcacccagtgaatgttaatgatcattggtattgttataagtaaggataaattggcatagtacctcccatataattgctcaataaatgttacttattataaataaggatgaagaactcacaccaaattggtctttaatagcctgcatctactttggtgcaatgaaaagaataaagatctcttgtgaaaccttgcaaggcaatttcaaataaaagtaagcctggatggacatgtggctaccaccagctgggcgtgtcatctagcgtcatcatgggaaatggctgcatgtgccttaggttccatccagtgatgtcgtaaaataaaccagccttcttgaaccctcctgccagtgttggcttctggcattgaatggctcgtggctcaccccctggctagggtagatgcctctatcccaaaggctttatggtgttcttgttgcctcgaactgagttttttcctccctctctctctgttttctgaccctctcatcttgtatcgcaggttgaaaggattgtagacaagaggaagaacaagaaaggaaaatgggagtatcttatccgatggaaaggctacgggagcaccgaggacacgtgggagccggagcaccacctcttgcactgtgaggagtttattgatgaattcaatgggttgcacatgtccaaggacaagaggatcaagtcagggaagcagtccagtacctccaagctgctgcgtgacagtcgaggcccgtcggttgagaaactgtcccacagaccttcagatcctggaaagagcaaggggacctcccataaacggaagcgaattaaccctcccctggccaagccaaaaaaagggtattcaggcaagccctcttcaggaggtgacagggccaccaagacggtgtcttacaggactacccccagtggtttgcaaataatgcccctgaaaaagtctcagaacgggatggaaaatggggacgccggctctgagaaggatgagaggcactttggaaatgggtcccatcagcctggcttggatttgaatgatcatgttggagagcaagatatgggtgaatgtgacgtgaatcacgctacactggcggagaacgggctcggtttgtagcttttctttctcttgggtttggctctggccatggcgaaaggggagctctgcctgtagcctagggacatacataagacccccacctccatccccgtctcttagctagccagcaattcccccttcatctctctcacctagagctttgtggactcggtcgtaggcccatgttggttacagaccctcatgcatgtggggaggctaagcctctgatgctccagccaaggtctggaatgggtccaaagttccagactcttatttcaagacacccaaggccatggtaacccctctagacccacttccctgagggcagctcaagtcctcacccccaggacccaagacacgtgtcctcagcgggccagtgcctcccagggcacagtgcagagcccttgcttgcagcctcatcatgcccccagcagtgtagcccagagaggtagggtctgggttggggtccgtgccgtcttctcagacacagtgtggacttggagttcaccacgccagtgcctgtgctggagcctcttgtccttctgctatctctaggttggatgattgacctatattaggtcctgtcttagtctgttcaggctgctgtcacaaaacaccttagaatgggtaatttatgaaaaatggaaatctaatttctcacaattctgaaggctagaagtccatgatgaaggcaccagcagatgctgcatcgggtgagggcctgttcctcttagctggtgccttctgtgtcctcacatgatagaaggggcaaggcagcgcccatcagcctcttttataagggccactaatcccatccacaaggatggagctcttatgacttaattacctcctaaaggcccctcctcttaatgctgtgactgtgttgtggcttaggtttcttcatatgaaatttggcagaacataaatgttcagactgtagtgggtcctaaatgctgtcttgacctcatcctgcactaattctttcgattggcagcctcttactctaacacagcctgcatatgttgtgttaggttatggaattcctcctttttccaaagtctctgtaggcaaaattaaggaaacaggaggtgatgacccatgtagttcatactcccaaacatgagatttcctgtgtggtcacattgccccttacctgagtccttcatggcatcagtctttcaggttagctgcttgtgccagttatgtgcagtccctcacttctcagacacctgtgtgtctacctggtggcatttgtctctttggctgccagagacccgagccttggaatgtccagaaatcttacaggagtgtggacaaccattgcccaacagggcagggccatcagattccctgatgaaaccagggtgcgtgtggagaccgggatgcttggatgcagggggaatggttagaagggctcacagaaggttggggtgatgaggccaacacacttcagtgtgacgatggtagatttggagtccagaacgtgcagagctggctcccctgcaagagcttgctgtctttaggtactcttgctgagaaatctgagcaatccgtgttgaggctcctctttctccagagagaggaatttcacccaaacaggatttacttagcatctttgccccagactgactcacgtttccgtctcgggatccctgacgctgacgtgactgtgcctgtgaacatatgtaaaagctgtttgttttagaaattcatctctcggggagaagtgggctcgtgtaaatggggcttggcataaacacccgtgtttgatgttgctgtgacggctgctggcggtggcggagttccctgtctcaggaagggtggcgaggggagattttgtggccctttgggtgcaggggcaaggctctggcggggttccctgcattccagctgttagcagctccctgccctgctcatatggggcaatcccaagagtaaagcatgagggaggaagatttgctgactgtagctgacagtctgcagtgtgaaggagagaagccagactcatagaggggtctacatgagggtgtgcctcttgtgctgtgcaatcttctgcggtgaggcagagctgcgagctctgtgctcttcacccttcggctttgctgatgccccctggtccatgacctggtgataaggcatggtaccccacaagcagggaaaacaggtgagggccaacctgttgagatccgttgattgtcctgttagctccaaaatgctattctagacctttcttgtctctctgatctcttatcttcctcatatttgcctgacgttgtgtgttctctactcccacttgagccaatgctggcctctattttgttctgttttgtctgtttcaaaagggcccttttgcttaatcacatcccatagcactggtgcccgtaaggttaaggcactggttctcagattctgcatgtattagattatctggcaactgatgagagatgcagatcccatggaatctgatttcctaagtctagggtggagcccaggagatggacttgttaacaaacttcctgggtgactctaccgcattttgagatgagctttgtggccaaatgtgtggggggtgggaccttgaagtttcacatcaggtgtcaatttaattcaattcaatactgatttttttttatgacttcctaagagttattcaccatgctgggtgcttgaagtagagtaatgaagagataggtatggacttttccctctgaaacttatagcttccctctgaaacttgccaggaagttggaatgccggcctctggccccatgctgagaaggcgcccgaggctggctccatggaaggagtaacacatattacatacatgtgcatggcttcaccatacccacaatgacgtcttctgtggtcactcgtgtgataattgtcccagccaccatcagcctttcaccttctagtcagaactagcttgttagccaggtctgggggaactgggaagaggaaaagactgagaatccttgcttgagagagaaggagagtgttgaagagagtggtttgaggttcctggacaagacccaagacaggggatgccgtggttccagaatttttcagcaacaggccagaggtgtagtccagcaaaacgtgtttccatgtgtgttttcagccagagggaagctttgctgaagccagtgttcaggcccacgtagccctgaatgtcctccttctaccctcttccctaacctcaccttcccttatctggactaaaggatccagtctccaggggcccaagggtgagcactgggggtttgcagcacaaaggagggctcatcttagcccagcagaaggggttgggggatcctggctgcagttgcacagcatttgttttgggggtgggctgttgctttttatatggttttagcttctctttggtgagttaaggttctgcatacagaacagcaacttatgtaacatgttactcatttactgctgacttccctgatctactgtggaacaaatgctaaattggggctccggcgggtggtgttttggtttcagactgcgctttttccccagcagtgtttgtggggcgtgtgcagcagttctacactgctcttgattctgagtcttctctgataatgagtactggctttgtggtccggggcccatctgcctcagtatctcttggggagcttgttaaaacgggctgtatcccagttgaatgaatcaggatctcagggggctggaggggtgggttctgcacgttcatgctgaattgtaacagccacaggtgtgtacaggagctccagcagatgtgtttggtcgtaagagatggttcatagatccatctgttggtagatccatctttactccctggatttgaagcttgtgagaaggaatgtgatctggtccttcaaagttttaaaacctgtcatagtttctctgccttgcttgcagtttctactaggcatctctctcttttttctaaaactacgcgagtttcatcggtacagaaaagctggtgggtttgctaacccttgctgtggttctgccttggtgaactgcttagcactcgtctaaacaggccaaagcatcagtgttctatggattcacacgagcctttactctgtgaaacgtccctaactaggagccatcgtttctctttgagccctagaatagcataaagacttgcagcgttctccaaattaccaggaaggtgatgagcatcactgttgatgccagtcttgtggccccatgtccacatttctgaaaggacgtttaagatcctttccttgcatcttgatgactgttgtctgctgcacagacgttgcatctcacacattgcatgattcagtgtttgcagaattatctctaccattgaacgagtcattccacacaacacacacacgcaacatttgccattttctctccattgatcttttaaaatcgtctcagctttcacttctagaacatttgtttatctcttcctactcactctttcaacatgattatcatttttccctttattgattataatggataaccatgttttaaaggcagttggaaactaagcgcaagcaatgggaagtggcctatggcttttgagaatctaggggctcccaaacatggatccggcgtcagaatcccttggagggcatgttgaaacacagactgttgggtgtaccttcagcattctgatttagtaggtgtagtgtggagcctgagaatctgcacctccagcagaagttcctagatgctgctattggtccagtgagcccagtttcagaactactgctctagactaatgagctccaagatggcggagatgaaaatgcagatggtgttgtgcctgccaggtggtggtattgaggaaacttgaagtgcttgtgctctgcacctggagttggcattcataagactttgtaaagagaaagtttgtgaaatgaaaagctgtaaggttgaaagttttagagtataagtacttccctgagatgaggccttggagtttccaaagtaccttgtgtgatcctcatggcagtcgtgagaggtagtttttctacccattttacagaggtggagaccgaggttacaagtgtccaggttggaattaggagagaaactcaggcaatttgactgcaaatttaactatagagctggcctctataccacggcccagctggattccaggcagtagaatttccccaagccctgattactgacagagacattttgtgactgggggagggtcaggagtgcttggtggtacaggatgtacttctttgacaccctccttgtttgtttatttatttatttatttatatatttttattattatactttaagttttagggtacatgtgtacaatgtgcaggttagttacatatgtatacatgtgacatgctggcacaatgcacccactaactcgtcatctagcattaggtatatctcccaatgctatccctcccccctccccccaccccacaacagtccccagagtgtgatgttccccttcctgtgtccatgtgttctcattgttcagttcccacctatgagtgagaatatgcagtgtttggttttttgttcttgcgatagtttactgagaatgatgatttccagtttcatccatgtccctacaaaggacgtgaactcatcattttttatggctgcatagtattccatggtgtatatgtgccacattttcttaatccaatctatcattgttggacatttgggctggttccaagtctttgctattgtgaatagtgccgcaataaacatacgtgtgcatgtgtctttatagcagcatgatttatagtcctttgggtatatacccagtaatgggatggctaggtcaaatggtatttctagttctagatccctgaggaatcgccacactgacttccacaatggttgaactactttacagtcccaccaacagtgtaaaagtgttcctatttctccacatcctctccagcacctgttgtttcctgactttttaatgattgccattctaactggtgtgagatggtatctcattgtggttttgatttgcatttctctgatggccagtggtggtgagcattttttcatgtgtcttttggctgcataaatgtcttcttttgagaagtgtctgttcatgtccttcgcccactttttgatggggttgtttgtttttctcttgtaaatttgtttgagttcatcgtagattctggatattagccctttgtcagatgagtaggttgcgaaaattttctcccattttgtgggttgcctgttcactctgatggtagtttcttttgctgtacagaagctctttagtttaattagatcccatttgtcaattttggcttttgttgccattgcttttggtgttttagacatgaaggccttgcccgtgcctatgtcctgaatagtaatgcctaggttttcttctagggtttttatggttttaggtctagcgtttaagtctttaatccatcttgaattgatttttgtataaggtgtaaggaagggatccagtttcagctttctacatatggctagccagttttcccagcaccatttattaaatagggaatcctttccccatttcttgtttttctcaggtttgtcaaagatcagatagttgtagatatgcaacgttatttctgagggctctgttctgttccattgatctatatctctgttttggtaccagtaccatgctgttttggttactgtagccttgtagtatagtttgaagtcaggtagcgtgatgcctccagctttgttcttttggcttaggattgacttggcaatgtgggctcttttttggttatttatttatttatttttatttttatttttatttttttgagatggagtctcgctctgtcgcccaggctggagtgcagtggtgcaatcttggctcactgcaagctccgcctcctgagttcacgccattctcctgcctcagcctcccgagtagctgggactacaggcgcctgccaccatgcccagctgattttttttgtatttttattagagacggggtttcaccgtgttgggcagcatggtctcatctcctgacctcgtggtccgcccgcctcagcctcccaaagtgctgggattccaggcgtgcgccactgcgcctggccgacacctccttgtttattgatagatgggtatggtgcttctgagcctgaaacgctgtgactaactccatgccactcaatctgaaaacctagataacatcatcacttccatagagaaatacaactcaacaaaacagcctaaaggagggctagaaagcctgaagagagaaataactattaaagaaattgggccaggagtggtggctcatgcctgtaatcccagcactttgggaggctgaggcagtggatagcttgagcccaggagttcaagaccagcctgggcaacatggcgaaaccctgtctctccaaaaaaatacaaaaattagccaggtgtggtggcacatgcctgtagtcccagctttccagggagctgaggtgggaggatcacttgagcccaggaggtggaggctgcagtgagctgtgattgtgccactgcactccagcctgggcgacagagcgagactctgtctcaaaaaaaaaaaaaaaaaaaaaaaaatacattgaattggttgttaaaaagtcctcagaagaagtaagaaaggaggaacacaaggcccagagggttttgcaggcaaatctaaacgttctagaatagatcatctgaccacacattctagagcagataacccctcccttatccaaatgattatggagaacaggaaaatgggaaaatactcccaactcctgtgacgaggtcagtatgacctggatttccaaaccagacaaagagaggaggagaaatgcaaattacaagtcaatctcacttcagaatgcagtagtgaaagtcctgaataaccttctgggcttattatagttcccttgatacttcctcaaaactacgactgtttcagaaacatctcattccttgccctgaacttgaccccagttcattgcctttagaatcaccactgcttctctgggtgaggagcttgtcccagaagaggcccagggaaactggttcaggaaggctctgactgtcatcggcagtggccccacactatctggtgaaccactgagaggtcaggaagggtgttcccggggcagcctcttgtcagcacaggtatccatgtatccacttccctgagcccagctgttcttcctgacccacttcaagtacccacccccaggccaacacactttcactaaccttttcaatttttaaaagcagatgatttttccaagtcagtaacaacaaaaacttgagggttttttaatcttttgtctttcacagggtggcaagtaaggaaggtgtgctaatgaactaacttaaaaccctttgatgtggtggtgttaagaccctgtccaacttggccaccgccctatgcacatggaaagtgccaggctgtgatgggaaatccgactctttaaccaggagcaacttgacctatggcagatccaaggggagaatcgattctccccgcttggctcctgaattctggatttgattttggtgcccagaagaggatgatggagtcttgaccactgtcaaggtttagaaaccaactaattgcttttcctacctgctcagctgtcgttttcctccctcaatgtccttaggaaagtcttaggcactgtttgctcatggctatccatcaggggacttccaaaaagggtatagtgggggagtggaagcgatcctccccaggagcaagcagtaagcgggtacagtgtctgtagagggctccaaaacaataataaaacttcacctcctaatgtcggtgaaaagccgctctccttattgagggttccaaaacaataataaaacttcacctcctaatgtcggtgaaaagccgctctccctgttgagggttccaaaacaataataaaacttcacctcctaatgtcggtgaaaagccactctccccattgaggtggatcccagggccttcctccaccctgactcctcacacaaagcagccagtcttcatgaatgatgatgataatggtggcagcggtggtggtggtggtgatggtagcaatagtagctaacatttcttgaggtcttactgcaggtaacgcctagctctttgtatttgatctactaaatgtgatttaatttcctcagtggttctctgatggagcagtttaacaacatagcaacataacaaggttacctgggatcaaccttgtttatagatggggaagctgaggctcagcaagggtaagacacagcactgagagaaggaattagggtgtggtgccgggtctggggatgctgaagctgttgggggtctgtgaccagttttgtaaatgaagaaaggtacttcagggattcaggttgaagccaacagacctttcccagatgccaagggcattgttctggccaacacccctgggcctgcctttgaggcatcttcagtagtatcagagatgctgacttggcattccagggaggtggaacctctggtcctggtgattttccttagggccttagattaaaacacacacacatgtatgcatgtacatacacatgcacatattcacatcacagatgtacacatcacacactcatgcacacatcatatatacacacacacctgcacatctatgcattgtaaaggggactccctcaattgtcaaagtttatttcaatgctagaagaaatggcaaaaaaaggacaaagatcttcaccaactgatgaatggataaacaaaatgtcgtcttcccagacgacggatgttattcagtcataaagagcaatgaatagtggacatatgcggcaacgtggatgaacctcaaaaccacatatgatatgattccacttatgtcaaatgtccagaataggtgaatctgtagagacagaaagtagattagccgttgccaggggctaaggggaggagggagtggggaatgactgctaatgggtacggcatttcattttgagcaatgaaaatgttctggaattagattatggggacagttgcacaactctgcaagtcacactaaaaatcactgaattgtgcactttatatgggtgaattttatagtatgtaaaataaatctcagtaaagctgtttttgttttaaaaaaaaggagaagaaaaagaagctagcaagtaggatgaaaaataacagctaccgtttccctactgcttgccatgtgcaagggagccttctaaatgctctccaagaagctgtgcattgaatttcctcgacagcccccatttctacactggaaaattaatgcttaaagaagacacgtgcattgcttgagttagtccaagtgtcacagaaggtggagctggaatggaaccacagtgcccactcgtgaacccaggctcccatgtgggaaatcgaggtactcttagtgaaccaagggacgctgtattagttccctatggctgctgtaacaaattcctcccaacttggtggcttaaagcaacaccaccttcttcccttatagttctggagtcagaaatctaaaatgcattggcagggctgtgctccttctggaggccctgtgggagaatccatttccttgccttttccagcttccagaggctgcacgttctcctcggctcgtggtccctcatctctataacctttgcatccatcctcacatctccttctcttgactccaagccccctgcctccctcttacaaggacttatgtgattacactgaaccaaccaagataatacaggataatctcccatctccaaatccttaacttaatcccattcacaaagtcctttttgccatgtcaggtaccacattcataggtcccagggattaggatatgagatctttaaggatttgctattcatcccaccacaggcatttaggagagtttgaggggaagaaagggtatgcatatgggtttgtattcttgaatgggcaagaaacctgctggtaacaaggaaatgttaattttgtcgtctagattattaaaattatttcatttaagtgcacttgcacatctgtgcattgtgaaggaaactaccttaattgtcaaagcttatttcaatgctagaagaaatagcaaaagccacatcaagtagattatttcatttaagcgaaataattattttgtttaaatgaaataatctacttggtgtggactttgatataactggaaagtgttgaagttgacttaaattcacttgttgatttttttaaaattatttatttatttatttttgagacagagtcttgctctgtcgcccaggctggagtgcaatggcatgatcttggctcactgcaacctccgcctcccgggtccaaacgattctcctgcctctgcctcctgagtaggtgggattacaggtgcatgccaccatgcccggctaatttttttgtacttttagtagaaatggggtttcaccatgttggccaggctggtcttgaactcctgacctcaagtgatccacccacctcggcctcccaaagtgctgggattacaggcatgagccaccacgcccggcctcccttgttgattttagagatgggagcaagcagctcctcctacaagacacaaaacacttatctaatcctaggatgcatttctatacgacagttactgcatgacagtgttttgtacaagccagcgtgagccttcctagtgcccaatgagctgctgttaataatgacaataacagcaattgcaccaacaacagatatttattaagcccttgctatgagtcaggtgttggtgggctaaggatgttacatttagcagctctgttaatcctgacaattctatgaagtaggttgtctttttatccctggtttgcacataaagaaatggaggctttacaaagttagttaggcagctggcctgcagcctccagatggtaacaaggtagagccagaattgtggtcctctttcttcctttcctttcctttcttttcctttcctttcctttcctttcctttcctttcctttcctttcctttcctttcctttcctttcctttcctttcctttcctttcctttccttttccttttcctttgctttgcttctttccttctttcctttccttctttctttcctttctttcttttcctgggcattttaaaatggctttcttacatcaccttatcctgtgatatctgactgtatcattagatcttaatcacacacaaagggaaagcctgttctactcatctctctctctctctctgtgtgtgtgtgtgtgtgtgtgtgtgtgtgtgtaacattttgtatgaaaacacttgtattttgatttttctgctcaatatagcgtatgtctgtttccgtctatttccatattgggcaactcttcatattggaattttagtagtgccatttatatgttttcagaaggatatacaggttgaatgtccccaagtccaaaatctgaaatgctccaaaatccagaactttctgagcatcaaaatgatgcttaaaggaaatgctcattggagcattcaattatcagattagggatgcttaactggtaagtataatacaaatattccaaaatcagaaaaaatcagaaatccaaaacacttgtgatcccacacattttggataaggtatacccaacctgtgcaatatttgatttatgtagccagtctcttgttgttggacatttaggttaggtctaaacatctttggttttctttcatttttttctggactatttttctagactagattcccagaggcaggattatactgctaattttaccatatccttctaactccatccaaaaaagaataataaccagtgaggcataattttctagttttgtcattgccttgccagacgtgtgtgtttaaggggaacaagaggagcctcggtatcgtttatttgcatttctttagtctccactgaagctgagctttttctctgcatgctcaagtactctttgtaacttcctctttgtggctggttcactcctgtcttttgagattggggagaattcagatacacagggaagaggtatggtatggcaaaggaggagagcccagagcatgtttgctggttggtgagaagatgcgtttggggcaggggctggtgtgcttagggaaagacttgggcgacagctgaaagacaggctggggccaggtgcaggaggggcctgggtggcagggaaccccctgttgtacttgtggcagccactctaatgcaggtcatccatggaaggactggtcctaaatttttgatgaactggcagaaataccaaaatctggttctggcccctatgtcagccactctggccttcctctggcttgtccgtaactctgtaccaccctctttaaacccactgggcagctcggctgatagacattctccattaagggctgccccagacacctctactacctatacccacctgtctgctccctggagagctattaataaggagcccagggtgtgggtgactccagagaaacatcaaagaaaagagatttggtaggggctgcggcaggagagagaagcctccactggggtcagggatgccatagaggaaagtcacaaccctagactggttagaagaggagaacccaggagacaaaatcctgaggcagccttctttagatattcatgttattccaggtggtggaagaacagctggtgaggcaagcccctgtgtatagagccccttttatcttcctcgtgcgcaacctgactatgctgtgtatagagccccttttatcttcctcgtgtgcaacccgactgtggtgtggtgttcctgggagcgccagcctcgaggcctcgattcacactttttatgttgcaacatggcttctctttctttcatcctgtcccagaaagaaaatcgagaccctggggcaaaatgagcctggaaataggtttgcgcacctcgtgtcattaagacgttgccgtccacggagccccggggttctctgagggcctcctggtgagaagccagatgggtggactccagcgctcccttctccatgtcagccacagtagctgcttgtattagtccattctcaagttgctaatgaagacacacccgagactgggtagtttataaaggaaagaggtttaattgactcacggttccccagggctgtggaggcctcaggaaacttacaatcatggcggaaggggaagcaaacacatccttcatgtggtggcagcaaggagaagtgctgagcaaccgggggaaagccccttataaaaccatcagatctcatgagaactcacttcagtatcacaagaacagcatgagggtaaccgccccccgtgatccagtcaactcccactgggtccctcccaccacacgtggggattataaaaactacaattcaagatgagatttgggtggggacacaggcaaaccatatcactcctgttttatttgtttcatgtgagggtttgtcatgtgcttttgttgagggaaaagaagacaggaaatgagaggacttaaagcatatttctgaatacaccagtttaataaatctgcccaccagtggcatgagctacttgatgaggttgttgtgccccatgtcttgggttgtttgggtggacttaggcagacttaggcagagggattcctgcatggagacgggtgagattaggtggcctcacaggaccgagtcagctcctcagagcatgtgtctggctgggcagggtcgtggccgctctgcagtcaagaccctcatggtgtgcactcactctcctcatggctgagccatgtgtcaccacagcccatgtgtgcagaaatactcagctcatttttggaggctccttgtccaagttccgacaggtgctcagggagcttttgcagcgaccatgcagggagggagaacacaggctctgctttcagtgggggcacctgcctgaggccacaaagccagccagaggataagagttagctgtcttgcccaccgaccctcctgcttggcctctctcgatgtcctagctcccaattctggcatcccccggctgagggagatccaggtactgacctctgattggctttcatggctccacgcttacacctgtctgttccctgctgccccagatctgtgccaccatctcccaccatctgcttgacgcggctccttgtccccacaagacggcagtgaggtggaggggggacatctaaagggccacttccgacttggttctgaggaccattgtcctgagtcttacagtgagggcagagccactttccatggtccgtggggcctctgagtcctgggctgtggggccttgggggtcaatatatcgtcgtatctgcttccccttcttggcactttgctggatgcttcctctgctcggccaggccggtcaccttggcctgtcgtcttcccattaccttccagtgtgcagaaatgtggcacccactattgactcttctcctttacttttgcttgtgttaatacttaaaaaaaaatcttttactgccattttagagtggtttcaagaaagaggagacaaatttgtcagtgtggtatatctaggtccctaaaatgttcttctttttttctttactttttcctctcctctcttctcctctcttctctttttgttttctaaagttacaaataggtgagttgtaaaaaattcaaacagtatggaaaatataagcatttaattttaattttatttttaaattattattattatttgagatggtgtctgactctgtcgcccaggttggagtgcagtggggtgatctcggctcactgcagcctctgcttcatgggttcaagtggttgtcctgcctcagcctcctgagtagctgagattacaggtgcccacccccgtgcctggctaatttttgtatttttagtagagacagggttttgccatgttggccaggctggtctcaaactcctgacctcaagtgaatttcctgctttggcctcccgaaatgctggggaaaatataagcattttagaaattaaagtctccatattctcccttcccaaatcctatttagaggtgacttctgttaatgtttccttatggatcttttgggactattctctaagtttatatatatgtatatgtatttatatatattaaatctatgtactttattacataccatatattatatatgtgattatattacatatttacttaaatatttgtttgttgagtgatgaacaggaattatcccatttctttctctctccatgtatgtaggtatagatatgtatatatctgtctgtcatctgtctgtctattcatttatccattatttatctgttagccaaggcctcaccaagttgacatccgagtaaagattgaaggtggtgagaacaccttgtcctgcaatttcttttttgacttaaagcctgtcttggaactctttctgagtcaggacgtgtggaacggcctccctgtttttggctgcttgggatttacggtgtgcagggacttaactgttcctctgtgatggccatctgggctgcctacaaagggacctgctcctgccaaacctggctagggccagtctttgtaatgcttttccaggccctgttgttttaattttagtttctaaatgtgggtgagcatcttctcatgttccttccacttgtgtctctccctgggcattgcccgggtgccatcctgctgtggaaacagtggtggcgagtcaggggcattcagccatgttgcctggaacaaatgacccagcctctgtgggccagattcttaatttataagatgcagatattcatacctcacgggttgggggtaaagaataaatgaattcgtttataggaagcccttaacatattcgctggcttgtggtagacatttgataaatattagccgttatttcaattttttccccctttttccaactgggtctttatatttccccacttgtttttaaaatcactttacatacagtacacatatatgaatcctttcctatgtatgctaaccagtactcataaaatgactgccatataccaggaactgtttagacaaataactgcaatacctcatgctgtgatggagacatgcagaagatattgtggggccataggtaagggcaccgaagccagcttaggggaaggaattactgagggcttcttggaggaggtgatgcataagtggaatctgataaaatgagccgaaatgactgaggaaaaaggcagggatgtcaggaggtgatgacagcatgtacaagggcatagagctgagggacagcctctgggtgcctgttgacacatcacaaagaatacagcagtccagccaattctagagcagcctgcacgggaggctgagctccagggaattcctcgggtagtcaggcttgtcttaagaaccagatagatggaagcccaccccatctgtctgtgttctgcatgtgtgactccctctgtctgaatgcctcccgctgtgagccctcacgtgagtagtaacctctgctcatcctgcaggtctggctcaagcagcaattcccccatggaaacctttgctgactgccagcatagctcagtttccgtttttatttgcacacatggaatggtgtttcttggttgacagcactgacctcggtttgtagtggtcacactgattattcgggtaatctctgcctctttcactcgatcagaagctccacaggggagggatggtctccatttttgttcacagctgtatcaccaacacctaacaatgctgggcacttagcaggtgcttaagaaatgaatgagtgagtgaatgaatagatgaaagagaggacttaaggagccggttctgctttaagatgggggtcctgaggccaggtccacccactgcaaacccttctgacatctgtcaaagctgcccatcccctggcccagtctttccttctctccttgagttgtcctgggtgttggcttcacagcctctgctcatggtaacatgtcctggaaagcccgtattttgtcagggctcttcacagcaacgacaggattcccttcccattggctcatctggtgattgttgtcgccatctgccacgatggccctgcttgctgtgttcctcttccctttatattcacgaagccacagtagactcttaataaagcgccaggctccctcccccatgaagggcattgtgagttcttttcagcagggtgcatctcatttgggctgcagcctctgtattttgcgcagttctttgctatgagagagcgaatgcccaaatcatgtaatttatgacctgccttgatggtaacataggacatgaaattggtggacttcttaatagacgtcccagttacaggaagtattgtaagatttcacctttaaaattgctctcattttgcaggtagcatagaggcgaagaaactgataagagcaggcaggtagaaagaggctccgtgtgttcaaatacaaacattgcctcttagcatctccaggcaggtcttaccagcttttgagcctcacttttcacctctgtagtccgggaatagcaagcctgccagaaaggatgaagcagtgggtcctggcgcctcatgagtcttcatttctcttctcctttgtcagactccgcttcaggtggagcttcctgctttgctcaagaatgtgcttttctaccccaccctcagcctgccctgtcgttttttcattgatcctaggatattaggttttattctgttgcataagccagcaaggcgaaatcaagagggacagcccctgggtgcctgttgccacatcacaaagaatgggttgcaggacagtggactctgttacttttgtgacttttccatggaagttagagtcttgagtttttcacctgccatcttggtgacagtgccactgagtaggaggttctgcctccgagtttgttctttcttcttctgttccactgtggacctctggaagcttctcccatcttcatctcctttcccgattccctcccacttcaccacccttgcagaaagagggtctgtcctgagttcctggaggtttagcaagacatctccatctctggcctggcttccaccagtaactcctcatattattaggttggtgcaaaagtaattgcggtttttgctatttttttttttttttttttttaatggcaaaaacctcaattactttttcaccaacctaatacttggtggcagtgaatgagaaacaactggtcacaagatctgttgagccctcgtgtgtgccaggcatggcattgagtgctgaggatacagcccaactcatattcctgtgggaagaactgaggaaagagccaaatattccagtgaactgtgagcaggtacggcagtgccgtacatgaacgtggataccaccgaagcaaggagattatagacgcagcttccacctgaaggatgcatggagcttgatcaggcaaagaggagaggggagagtgttctagacagtgagaactatattttaattaagaagatttgtagaaaatatgtaacatctatttcaagcatcattaataaatgccatttatgatttcttcatgaaatatttattaaatgactgctgtgagctagtattgtatacctagaagcaggtctcagcatgcctcgttctgggggtatgatgagtaaggcaagacacagtttagggaagaaaacaaacaaatggggaaatgacaaatacattgacaatctccataccatgtcaaaatagccagcatttactgagcccttgctaagccaaaccctcttgctagcactggcagttcctcagttaatcctagcagggagggtcattacccttcccatttcacagatatggaaactgaggtatatgcaggtgaaatagcttgcctacagtctattagtcagtaggtggctgttccaggattcagatctagttgtcctggcttgagacctagattcctaaattctccttttctgcttcttgagggacagggctatctgggaggccagaagagagctacattgtatttggaaaactttaaaaaatttttagcgttttgagatcattttctcccctacagttcacttaaagaggcatttgctttcccctcactatgtgctggggacgaaggctgtagagatgaccagccgtgtcttccaaagaactcaaagcttattaagctgattaagggatcagctggtccccagtgacctgctgcaaagctgagcatgcgaactcaggaaggcccaggacaccggagccctggggatgggctgttcccggcgcttggggaggaagagacagctgtctggaagagaagcatttcaagtggccccggaggattagatgtgtgaaggtggacggaaatgacattcctggccaagggaacagaggaagtaatggctcagagggtggaaaactcagtttcggagaacctcagacagtcctggaagttaaggtgtttatggggcaagagtgggagttaaggccagaaaacaggatgaggccagacgatggaggcatgtgaacttttgagcaggggagttgcaagaaaaggtgataaaaatgaattttaaaggaaatcactttatactttgataccctacagaatattttgccacataccaggatcctggcataatagagcttttggagttagcatggccttggagggttttaatgcaggagacatgatttgatttgtagaaaaagttccttttaatcaggttagttttgtattttgaattcatgctttacactgctgaatgctttaaacatttaggcggggcatagtggctcacacctctaatcccagcactttgggaggccaaggtggtggattgcctgagctcaggaattcgagaccagtctgggcaacatggtgaaaccctgtctctactagaaatacaaaaattagctgggtgtggtggtgggtgcctgtaattctagctacttgggaagctgaggcaggagaatcacttgaacccaggatgcggaggttgcagtgagccaagatcatgccactgcactccagcctgggcaagaagaatgaaactctgtctcagaagaaaaaaaaaatttagacatctgacagtgaacatcataagattacttagaggtgttggatgtagtgattagataatctgagaacctaaactttcttaaaattcgaagtgtatggattttatctggcataattttaacatgccagatgacagttaactgtggctaagatttttttttttcttgaatgcacctgtgaatttgagccctgctattgcattcaggtcctgagagcaaggattctgtacatgggactaggggcttttggttccactcaactgtagaactgatgagtcttctcttttatttaactctcccctccacctcacctcctgacatgattgatgaccggaagtggtcaagctgaactccccctgggttggtctgttctctctgttaattgtatctgctccccaagatgataagagtgattggaacactggggagaatggactggaaggaaagtgctttgcacctgtgtcttttagggggctagaaggagacccccaacaccacaatttttttatcctatcttccagcctcttgcttttttcccctatgtcttttgatcaagaggtaagaacttctgtaggtcctccattgtaagtctagtgtttattcatttattcactcattcatttattcaacaaagaatgacttgtgtcgttctttgtgctgggcctccgctggttctgaaggtatatgaataactaaaacagcccttgcctttaagaatccatctggtggtgaggagggagccagacatttgagaaaatccttgtcaagatgtggaaggtatccatgatgattttcctacagtgtgattcccttcactgtccagtacggtagccatcagccacaggtggttagagttatatttcaattagttaaaattaaaaaattaaaatttcaatagccatatgtggattccacctactgtattagacaatgcagatattgaacattttcatcattgcaggaagttctgaatcagactgtaagctctttgaaggcagatccatgtctggttctgcccatccgtataccccaggtgctaagcatctggtgaacactcactaagtatgtactgaatgaacatgggagaggataataaggagagtaaaagaagggtgtacaaacaaccagaagagagatgcactgctctggaagaatgtgcagaagagatatccctggagctccatcaaaaagtaggggacttttagcaagtggggaagggaggaagggtgctttctccaggagggagaatgactctggtctcactaacttccttctgtgttctgatgtctcaagccacacaaggtgttactattttgtttgcaatggaaggaaaattcatagcactcacgctgtgttctctccttgggtgtctttgagaggtgggatctcactcagagcgccagatgtgatataaatacgagttagtcatctaggtgtgagatcaactggattgcagaaaacaagtgttttcacgtatgaggccaatacaaagctttgcaagcatgtttgacacatggagacttcatgatctgtgagtgaggtgaatacggaatgcaccactaggaacatactaggaacattattaagaatttggcgtggggtatgttgtgattgctggagtgagttcccccacctgattgtttgctcatgcagtcattggatgaacactgggttaagcatgcggtgtcctctaggcactgcgctctgtgttgcagacacacaggtgaatacatctcaggcttatccctcaagaggccacagtctggtagggtcttcaagcaggtgtatggatgatgataacatagtgaaatgagctctgcttggtaaagcatcacatgacacaggaatcagatgtggcatccacattttctttcctcctttgttcagcaaagactaggctctggaaaacaaaagcagaacatccatcagagccaacaccatgaagagggcctgagaccagggctagtttcagtgtcttgatgctcgaatccagcatcaagcttggtcaagatgctggagtttgaccctcatgctggcacttcccagtggcatggccttgggttttggttttctcatccttaaaatggggatgtaaacagtgtcctacagggtcgtgatgaggatggaatgagacaacctgtgtgaatcccatagtaggcactcagcaacttgtgagtattgcatagttgagagaaaggactctggggaatatgccaaagtgacacttggagtctccatttcacactgttgtgggggcaggtgtagatcacttctactccagctgcccataataatcaaggagccaccctggtttctgaggatggctgtgttaagtgaggaaccagaatggataatgtatccctcaattggggatagcatccttcagcgatctgtctaaacttttcctcccttcctccaggcctgaagggaatgtggtggtgttctgtacctggggtttgaaatgttcttggtggagaacttggacatggttcctgtgccctgccaggagtggctgtgttttctgaaaacttatttgcatggtagaagtgccctacggtctgtccttgtctgtctcaggctctgtggcctcaccccaaccccagccctccacttcctgccctctcagacagcttacccctagctcaggggcagctgcccctgtatctttaatgacaagtttctatctttccttctgtgtcttgcacactgcagtgaattccctgacaccttttgttgctgcatgtagaccactgtgcaccatttcttgattcccctgggatccttctggcatttctctattgattgggcagtttttcttcccctctttgctgagttgagatccctctttctgtctcagagtttctcctcaggaaatcttacacacatctttattattttatccagtgtgattatctctgtcttttaatatgagtttaatatgttcacagaataatgtaattattgagatatttggattatttctcctattttaggtagcattttatttttacccattcttgttctctgttccctctctcattcctattttctgaccttttaatgcttttcactggattgatacattttatacattccttctccttgggctgactcagaagctagctgtagattgtatttttaaacttcagcacacatactaaagtatgatctttttctaacaaatatgatgtcctcttactgaatttggcaagatgcttccttctgcttggctttcagttgtcattgaacatgtctcttccacatcttactattattttatacacccaacattattaaacaccattgattattattttcacagccagtaattacatttactaaaattttaaaaatctatttttttacccgtgtcttcctctgaattaaatttttgatttgctaagtttctcttaatttttttagagtctgtggtagataaattttcttggtgttagaacacctgaaaatgtccatttatgtggtcctttaaatgctgctttagctgggtataaaattggttgacagttattttgtctcagcattttgatgaatagtagctcattttttcaagcctctgttattgctgttttcagtctgccattcctttttgacaatatgatttttctgtctatgcttttttttaagaactctttacccatggaattctacagtttatcgttaatattatttgtctgtgtgtcctgcttggtacttagagtgctctttcaaactgagaactttttctttttgagttctacaaaaagttcagctattcttttcttagagttatcccttatatagaactttgattcttatctgcaggatatttatgtttaaaatatatttaactttttattttgaaataatttcaaacttacagaaaactatgaaggacccattttctgattaaccagttttttaacttttttctctctttctgtgtgtgtctgtatatgtatatgtatatagacacacatatttataatatatacacattatataaactatatacaaattgttctttttctgtaccatctgagtgtagactatacattatgcctccttaccccttaatatctagtgtggatattttataaaaggatattcttttaagtaaacacaatgtagttaagaaattcaagaaattttgcgttgatgcaatacttttattttagcccacattcagtttttttgctattaccgcaataatgtcttttagatatttatttcttccaatatagaatacagtctagaattccatgatgcctttagttgccatgtctgtgtagtctcctttaatctggaacagttcttcagtctgccattgtttttaatgacgctgacatttttgaagaatacaagctagttattttactgagtttatctaatgtttcttcaaggttagatttagcttatgcactgaactagctgatatgatgctcttccttcttatccatctcatctgtctgttcatccatccatccgtctgtccatccatccatccatccatccatccatccatccatccatcacctctatcgtgagtacaaattcaaggattcttactttatgtgacagtttataatctattactgccattatttattttactattgaaaacatccaagatttggccagtgggagccccttcaagctgccttatatgcccttttgcaatgcctggctattcttttgatcacttcctatttttaggtacaataagattttctagcccaaagtataccttacctgcccaagccctggaagcagccatttctctaggagcccttgtttattttagtgggattgttatttagaaaccaacatgtgggatctacatagctcattgctatttgggtttcatttcttctaagccttttcagctgacagagctaggaaatatgtataatttttaaaatcatgaattcttaccaatacctatgatccattttaacctcactggattcttccttgcctctctgcatcccatatttgtatgtcttcttccacagagagaatcctatttctccacaatatcatatatttactcattttctcaatcctgaactactcataaaataatcttagaattgctccattcttaccacagtgaaaagcaaacccactaagaagagttcaagatttatctgttgtatattcataatattatatccaaaagttatttgtatttgttcttcccctctccccttttgatgtggttatgttattcctttgaaagacgattaggtttatttctttctcttttcatttagtttatttccaccccccatctttattgcttttattttatatcttaacatgttttaacatacttccaaaaattaaaacaaaaagatatcctcaaagaagggtcacctcttccccatcccttttactcaattttccctgccaaccacttgtgataatcaatttcattgttttctggtttattcttcttgtgatttttttttttttggaaaaaaaagcaaatttatgttattttcccatcttttttttttacatttaaaggtaaagtacttttccacctttcttctctttattggaatgtatactgtgtaaaccactccatattcatagagatagctctttcttttttagagcgacatagtattctattgtgtgggtgcatcgtagtttatttcaccagtctatgcttgcacatttaggtagtttccagtattttgcagttatagataaagctacaataattttatgcatatatatatttgtaccattggaagtacagttttcctgttaaatttctagaagtgggattggtgggtttcgtgagagtaagtgcataaacagtgttgtcagatactgccaaatttcttcccatcacacttgtacctttctgtatctcccccacaatgaagataatgcctgactccccacattctctgttgcagagtatattgtcaaggtcttgaatttttgccaagcataagatgcatgagaaatggtatttcagtgtagttttaattttctttgttatgagttttaatgtgcactattcttttgggtggatttggagccatttcttctatttaagggccatttttgtgtaatgctgtggattgtttgttctgtcttttgttcattttttcctgaaggaatttttggtcttcttatcttcagtgtttaaaagttctttacaattggggatattagccttttatctgtgatacacaactgtttttcccagtttgtcatttgctgtttaattagttctttatgctattcactgtccttgtttcctttctgtctgcttttgtttgaacatttcttgtttattttaaatgaatgtttttcttgcatctgagcatttgaaatgttcctattttaaagtccttgtcaaattgtttcatgatgttaatttaattttatttggagtaattcatgttttgagtattgattttgctggcttgttttctaagcgtgagctgtctacaagttttggtattttggtgtgcaggctcatttcaagagcaaagtttctgttttgttttcgtttctcgttccttctctctctctctgatagttttgtgttcgcctctacctggtcctgagatcctaataaagccttagccgtggatatcacatcccttggttactgttttactgccttcagggtggacagctcacttcatcccctggcttccagctctaagcctgggctccccctcccatcttgcagggaagacttagtccttgttgcctttgaagaacccacatcttccctcccctctcccaccccactgactgctttgtgtcagtgttgtgcctctcatacgcagagatgattatctcgtttgtgagcccggcttcatcttattgactctctccttttgtattttatctgtcgcttctgtatgtttggaacaggggcacggtgtcagcacgtgagtttatggagccttcttaatgggaaatactcctttgtacgctaaaggagggaatgttggaagtcttgaggggaacagaaggaaggaaactagcatgatgggggctttcctattttccagatatgtagcatgcaccatttcctttacttctcagctgccctcccatttcacacgcaggacagtgggggcacagaacaggcgagcaagttgtccagccctgcagcccgtgagggggatgtgggatctgaatgcaggcagtgcccccgactggacgtcaccctggcttttgggctcagcagagcagttagtcccctctgtgcctggaatgcctaatctttggcctaggcctgggtgtggggttgggagtaggagaggcatgattagggacactcaccaattagttcctcctttttgaatgccttggtgtcctccagctgacattggagaagtgcctggagtgtgctgggcactttattgacaccaggtcagttctttaattgattgagttcaaaacagcccgaagagtaggtacttttagcccctaccttttaaaatactaagtaagattgaatctcatttctcatattttgtgggaacaaggagaccaatgctcaagagctcgtgtggcttccttgcttctcccattagcaaatgtagggctgggattatttccatgtcctctgactgcagagccctaagcttccacagttccaacatgttctgtttctcacagcgtcttccctgccagcttgttgctgtcactcgggaagcatgatgctcctgaaggagagggacctcgaggactgctcggtgagagggcagagtctgaggggctctggaggcaccattcccctgcgtctcctggagagaaggcccgtttcagccacccgcatccagaattgcacacattttgaatccagtactcaaggaggctctgatccctgcttggctcagaggtgttgcatctttctaagtttatcggagaggcgagcccagtgtcctggtagagggtaggagggtctctttgcctctgctagtttcatggcttatttggtaagatggcctcagggccctcgtctcttcgggtgcttctccaccctgttgcgctaatggaaagaccatgagatttgggttcacgaacacctcccctccctgcatcactctttatcacatcaccctattgttttccaatctgtaatttttttaggtattagttacttgttagcttttcatctccccaacccaaagcaagctccatgagggcacaggccctatttctctactttcttttggatccccatcacctggtagatacctagcccataggaggtggcaagtaactagattttgaatgaatgaatgaataaaatgaggagatggctggctccaatcctggctcttccatttacaatctctgtgacttccagcaaggtactcacttttccttatctgtaaaatggactaactagaatggcaaatgtataagactgttcaataattgacacccagccttagagctgctcagaaaaggcctggcctggccccagcagggatggatgtccccaggctctgggcatctggtgacaccctgcgcccaccaaaagcagctcccatgaggtgaagcctccacgaacgggaccgtgccctggatctgcctgggccgctgcagaaaccacagccagctctgtctgattaggaaggccttctgagttgctgagggtttgagattaaccctgaaggaacaactccctctacacaagccttgtaattagacactcgtgtttactctccgaagttcactgaatcattttacctggtgtcaggagctgcatcttgatgtttgacaaagcctgattgcttttggtaagggaacaatacaaaactggggcttcacagaagctgtgggtggcacaggcccatctccatgccgggcagctctgatgtctgaagcgttgccttgcatgtagcagggtttggtggagcgttttctggtccctgccttaggcctggtccttgagattccaagattcccaatgccatttatgagcctgagcccacccggaggtggacccagggccctgtatgcagaggggcaattcctgtaggcttctaggtgccacgggtgttatgcagcgctgggctctgagtgtgccagtggccttgccttcagacattatgttattagagagacagcaaatattaccagaatggtattgtgctaagctgggcatgatgattataaagcaaataagagccaccatttattcctggtttactgtgtgctgcttctttaaatgttatcttacttgatcctcatatcctgctcaccaaggatcagaacacggagcctgtccaggctgtgtacacacagtaatcttccttaggaggggcatggggcaggttggcttcccgggctgggcttctggttgggttccggagtctcagtctctgtagtgactttttcccaacccagcccggcagagcgctgagcacatggtcagtgcctgtctgcgtctccttgcacccttcttccccaaatcaccacggctgagcagagtcatcgtgagatgtggctccatcctgcacggggcagtcactcacttcattggcagaaatggtgacagtccaggagattttccaacttccgttggcatgcaagcatggggcagccccatgcatgaggaagatggctcacactcgacaccacagtgactcctggggtttgaggaattcttgggttgtctggatcctggctctcaaagcctggaccctggagcagcctgatttttcacaatcctcccatgatccctgtgtacacgcaagtgtaagaaccatgggttgaagttctcaagcttgcctgcatgtctgaatcacctgggaagcattgtcatcatttttaatgaacttaattcctaaaacatattctttaaaataatagcttaaagagtgtaactagattgtttgtaactcaaagaatacatgcttgaggaattggagaccccattctccatgatgtgcttatctcacattacatgcctgtatcaggacgtctcatgtacccttaaatatgtacacctattatgtactcacaaaagttaaaacaataaaaagaagaaaaataagaaattaaaatactctttaaaataaatttcacttttttgttttttcgtttgtttgcttttttgttttttgagacggagtttcactcttgttgcccaggctggagtgcaatggtgcgatctcggcttactgcaacctccacctcctgggttcaagcgattctcctgcctcagacttccaagtagctgggattacaggcatgcaccaccatgcccggctaattttgtgtttttagtagagatagaatatctccatgttgatcaggttggtctcaaactcctgacctcaggtgatccgcctgccttggcctcccaaagtgccaggattacaggcgtgagccatcgcgcccagccaaatttcactttttaaccagttataggttcacagaaaaattggaacacgaaatacagcaagtttctatatagcccacacctagtttctcctatgaacatcttacattagtatgattttttttgttgttgaaactggtgaaccggtattcaagtattattatgaactgaagttcatactttatttaggtttcacctagtgtctgttccagagtcccattcagggaatattcagagaatattatgtttaatcatgcctccttagcccctctgggctgacagtttctcaggctttccttctttttatggtcgtaaaaagagttttgaggagagctgcttggtattttgtagaatgtccctcagttgggatttgtttgatgtttttctcatgattagagtggtgttgtgagtttttgggaggagggaccccagagggtaagtgccattctcatcacatcctatcaggtctatagttcataaagactaagaacgtgacctgtcactgttgatgttgactgtgaccacctggctgaggtatgcgtgtcaggtttctccactgtagggttacttcgcctccccctctacacactgtgctcttgggatggaagtcactgtgcgtggtgctcactcaggaatgggaagttatactccattgctttgaggttgcaatatttacacaaactatcgggaattcttctgcatggaagatttgtctcttctgcatttatttattcaatcatttatttaaagcagtatggactcatggatggtaattttatattttcagatttaatccagtactactatattttgttgctcaaattgttccatctttggccattaacagctcttttaggtggctcgtgtgtccttttgacatactcccatcattgcagcagattttttttgttgttgctttgctttgtttgagcacttccttctgttctggcacttataaacttacagagtcagccattgctccagagtttcctaggtccttttattgagaattgtgttagaaactagtatctgtgccccaggtatgttctttgctattgggatgtcattgattctgggccctctcagctgagagagcatggcaatacacatgggtatactaacctgtgtatatacccttatctatagatatttctgtatgcagccatctttatctgcatcaaactaaaaatgagttcatactggtgtttgcaactctaacccgtggtcacattctagccttctccttttgcttatctgtaaactccaactcccacagtgaaaacctaagtcccaccatctgcaatccatttacttaatcattcaattccagtatacaagtataacagtatcagaattgttagcccctaccgccatgggaatcaactttttcaactggagtacagtgctgtgtagagtttattttgcctttagtttcacaaactccgctcatttctaaagttatttatgtcggcaccatatttccgtaaccccttcagtaaggttgctttatacatatataattcagatggattcttttgtcacattctgcattctaccctgagatcctgtgccctcctaaatgacatttttaaattggcatgcttttaaattcgctctctgtgctgtaaatttctttggtatttgacaagcgcttaatgtctagtattctccattgtagtatcatgcagagtagttttaactgccctaaaaagtctcctatgcctcacctatttgaccttccccttattccactggaacctctagcaaccactgatctttttacctttttatacttttgcttttactagactgttttatagttggtatcatatatagatttttcagactggcttccctaacttagtaatacgcatttactattcattctttttttggtggcttgatagctaacttttttaaaaaattatttttaatttttgtggttacatagtaggtatataaatgtatgggtacatgggatgttttgatacagggatgcaatgcataataatcacatcatagaaaatggggtatccaccctctcaagcatttattccttgtgttacaaacaatccagttacactcttttagttattttaaagtgtaaattaattattgaccagagtcaccctgttgtgctgtcatatactaggtcttattcattgtttctatttttttgtactccttaaccacttcatctcccccgccccccgcccttcccagcccctggtaactgtcctcttctgtatttctatgagctcaattgttttggtttttagatcccacaaataagtgaaatcaggtaatgcctgtctttttgtgcctggcttctttcactcagcagaatgacctccagttccatctgtgttgttgcagatgacaggatttcatttttttatggctgagtagtactccattgtgtataagtaccacattttctttatccatttgtctgttgttggatgcttaggttgcttccaaatcttggccattatgaacagtgctacaacaaacatgagagtgcagatatctcttcaatatactgatttcctttcttttgggtgtatacccagcagtgggattgctggatcacatggtatttctatttttagttttttgaggaaccatccaactgttttgcatagtggttgtactaatttacattcccaccaacagtgtgtgagagttcccttttctccacatcctctcctgcatttgttactgcctgtcttgtgggtataagccattttacataaaatgcggtgagatgatatctcattgtagttttgatttgcatttctttgatgatcagtgatgttgagcaccttttcatatccctgtttgccatttgtatgtcctcttttgagaaatatctaaatcttttgccagttttttaattggattagatttttttccagtagagttgtttgagctccttatatatgctggttattaatcccttgtcagatggatagtttgtacacgttttctcccattctgtggcttgtctcttcactttgttgattgtttcctttgctgtgtggaagctttttaacttactgtgatcccatttgtccatttttgctttggttgcctgtgcttgtagggtattgctcaggaaatttttgcgtagaccaatgtcctggagattttccccaatgttttcttgtagtaggttcatagtttgaggtctcagatttaagtcttttcaattttgatttgatttttatatatggcaggagataggataggggtctagtttcattcttctgaatatggatattcagtttttctagcaccatttattgaagaagctatctttccccagtgtatgttcttgacacctttgtctaaaatgggttcactgtaggtgtgtggatttgtttctgggttctctattctgttctattcatctctgtatctgtttttatgccagtaccgtgctgttttggttactgtagctctttagtgtaatttgaagtcaggtaatgtgattcctgcaattttgttctttttgcttaggatagcattggctattctgggtctttcacagttccatataaattttgtatttttctatttctgtgaagaatattattggtattttgagagggattacattgaatctgtagattactttgggtagtatggccattttaacaatattgattctttaaatccatgaatagtttttggcgtcctcttcaatttctttcgtcagtgttttatagtttttattgtagagatctttcacatctttggttaacttaattcctaggtatttaattttatttgtggctattgtaaatgggataactttttaatttctttttcagattgtttactgttggcatatagaaatgctattgatttttgtgtgttggtcttgtatcttgcaactttactgaatttattggttctaatagttgtttggtgtggagtccttagttttcccaatataacatcatatcatctgcaaacaagaataatttgctttctttctttccactttggaagccctttatttctttcatttgtctaattactctagctagaactttcagtactatgttgaataatggtagtgaaagtggatatccttgttgtgctctggatcttagaggaaaggctttcagtttttccccattcagcaggatactagctgttctgttatatgtagcttttgttatgttgaggtatattccttctataccagttttttagggttttatcatgaagggatgttgaattatatcaaatgtgttctcagcaccaattgaaataatcatatggtttttgtccatcattctgttgatatgatgtattgcattgactgatttgtgtatgttgaaccatgcttgtatcccagggataaatcccacttggtcatgatttttttgacatattgttgaattcagtttgctagtattttgttgaggatttttgcatcagtgctcgtgagagatgctggccagtagttttcttttttttttttattttttttctttctgattttggtatcagagtaatactggccttgtagaatgagtttggaagtatttcctccttctctattttttagaatagtttgagtaggattggtattagttcttcaaatgtttggtagaattcaacagtgaagacattgggtcccggacttttctttactgggagactttttattatggccgtgatatcgctacttgttattgatctgttcaggttttggatttcttcgtggttcagtcttagtaggttgtatgtgtctaggaatttgtctgtgtcctctagcttttccactttattgcatataattgctcatagtagccactgatgatcctttgaatttctgcagtatcagttaaaaggtctccattttcatctctgttattaatttgggtcttctctctgtttttcttagtctggctaaatgtttgtcaattttgtttagcttttcaaaaaaacaactttttgattcattcatcttttgtattttcttcttttcaattttatctatttccactctgatctttattatttttttcatctactaattttgggtttggtttgctcttgctttcttgttctttaagatgcattgttaggttgtttatttgaagtttttcttcttttttggtataggcacttaaagctataaaattccctcttaatactgctttagctgtatcccataggttttggtatattttgtttccactatcatttgtttcaagaattttttcaatttccatcttaattccttcattcagtagcatattgtttaatttccatgtatttgtatagtttctaaaattcctgttattgatttctacttttattctattgtggttagagaagaagatgcttgatatttccatttattaatgttttaagacttgttttgtgaattaaaatgtagcctgtcctagagaatgatccatgtgctacagaagagaatgctgcagccattggattaaatgttttgtaaatattaagtccatttggcctatagtgcagatgaagtccaatatttctttgttgattttctgtctggaagatctgtccaatactgaaagtggagtcttcaagtctacagctcttattttcctggggtctgtctctttagctctaataatatttgctttatatatctgggtgatccagtgttgggtgcatatatatatttaaaattttatatcttcttgctgaagatataaagatagctctgtaatgtaatttgaagtcaggtaatgtgattcctgcagttttgttctttttgcttaggatagctttggctattctgggtctttcacagttccatataaattttgtttttttctatttctgtgaagaatattattggtattttgagagggattacattgaatctgtagattactttgggtagtttggccattttaacaatattgattccttaaatccatgaacatggaatatctttccagtttttggcatcctcttcaatttctttcatcagtattttatagtttttattgtagagatatttcacttctttggttaagttaattcctaggtatttaattttatttgtggctattgtaaatgggataactttttaatttctttttcagattgtttactgttggcatatagaaatgctattgatttttgtgtatttatcattatataatgaccctctttatcttatagtttttgtgatgaagtatattttatctgacatcagtatagctactggtgctcttttttggtattcattggcaaggaatatctttttccatccttttttttttttcagtctatttgtctttaaaggcgaagtgtgtttcttacaggcagcagatcattgggtcttgtttttttgtttgttttgttttgttttgttttgtttgtttgttttgagacagagtctcgctctgtctccaggctggagtgcagtggcgcaatcttggctcactgcaacctctgactccctgattcaagcaattctcctgcctcagcctcctgagtagctgggattacaggcatacgccactctgcccagctgatttttgtatttgtagtagagatagggtttcaccatgttagccaagatggtcttgatcacctgacctcgtgatctgccttccttggcctcccaaagtgctgggattacaggtgtgagccaccacgcccgacctgggtcttgttttttaattcagccactctgtcttttgattgaagagtttagtacattcacattcaatgttattatttataagtaaagactttctcctgccattttgttatttgttttctgggaattctgtgcacttcttttccttctttctttcattcctgtcttccttttagtgaaggtgatttttgtctggttatgatttagtttattgtttgttaatttttttgtattcattatatattttttggcttgagtgatatagtttggctctctgtccccatccaaatctcatcttgaattgtattcccataattcccacatattgtgggagggacccagtggaagataatttttttgtttttttttaattatactttaagttctagggtacatgtacacaacgtgcaggtttgttacatatgtatacatgcgccatgttggtgtgctgcacccattaactcatcatttacattaggtatatctcctaatgccatccctcccccctcccccctccccccaccccatgacaggccccggtgtgtgatgttccccttcctgtgtccaagtgttctcattgttcaattcccacctatgagtgagaacatgcggtgtttggttttctgtccttgagatagtttgctgagaatgatggtttccagcttcatccatgtccctacaaaggacatgaactcatccttttttatggctgcatagtagtccatggtgtatatgtgccacattttcttaatccagtctatcattgatggacatttgggttggttccaagtctttgctattgtgaatggtgccacagtaaacatacgtgtgcatgtgtctttatagcagcatgatttataatcctttggatatatacccagtaatgggattgctgggtcaaatggtatttttagttctggatccttgaggaatcgccacactgtcttccacaatggttgaactagtttacagtaccaccaacagtgtaaaagtgttcctatttctccacatcctctccagaacctgttgtttcctgactttttaatgattgccattctaactggcatgagatggtatctcattgtggttttgatttgcatttctctgatggccagtgatgataagcattttttcatatgtcttttggctgcataaatgtcttcttttgagaagtgtgtgttcatatccttcgcccacttgttgatggggttgttttttcttgtaaatttgtttgagttctttgtagattctggatattagccctttgtcagatgagtagattgcaaaaatgttctcccattctgtaggtggcctgttcactctgatggtagtttcttttgctgtgcagaagcttcttagtttaattagatcccatttgtcaattttggcttttgttgccattgcttttggtgttttagacatgaagtccctgtccatgcctatgtcctgaatggtattgcctaggttttcttctagggtttttatggttttaggtctaacgtttaagtctttaatccatcttgaattaatttttgtataaggtgtaaggaagggatccagtttcagctttctacatatggctagccagttttcgcagcaccatttattaaatggggaatcctttccccatttcttgtttttgtcaggtttgtcaaagatcagatggttgtagatgtgtggaattatttctgagggctctgttctgttccattggtctctatctctgttttggtaccagtaccatgctgttttggttactatagacttgtagtatagtttgaagtcataatttgaatcatgggggcagtttcccccatactgttctcatggtagtgaataagtatcacgagatctgatggttttatcaggggtttccgcctttgcatcttcctcattttctcttgccactgccatgtgagatgtgcctttcgcatgctgccatgattctgaggcctccacagctatgtggaactgttaagtccaattaaacctcttttgttccccagtctacccagtgtctttatcagcagcatgaaattggtacaagtagagtgggatgttgctgaaaaggtacccaaaaatgtggaagtgactttggaactgggtaacaggcagagattggaacagtttggaaggctcagaagaagacaggaaaatgtgggaaagtttggaacttcctagagagttgttgaatgtctttgaccaaaagcctgataagtgatatggacaataaggtccaggcttagatggtctcagatggagatgaggaatttgttgggaactggagcaaaggtggcacttgttatgttttagcaaagcaactggtggcattttgcccctgccttagagatttgtggaactttgaacttgagagagatgatttagtgtgtctcgtgaaagaaatttctaagcagcaaagcattcaagaggtgacttgggtgctgttaaaagcattcagttttaaaagggaaacagagcataaaagtttggaaaatttgtagcctgacaatgtgatagacaagaaaacccatttttttgttttaggagaaattcaagccaacttcagacatttgcataagtaatgaggagctgaatgttaatccccaagacagtggggaagatgtctgcggggtttgccagaggtcttcacagcagaccctcccatcacaggcctggaggcctaggggaaaatggttttgtaggctgggcccagggtcctgttgctgtgtgcagcctagggacttggtgccctgtgtcccagctgctccagccatggctgaaaggggccaacatacagcttgggccatggcttcagagggtgcaagccccaagctttggcatcttccatgtggtgttgagcctatgagtgcccagaagtcaagaactggagtttagaacctccacctagatttcagaagatgtatggaaatgcgtggatacccacgcaggtttgctgcaggggcagggctctcttggagaacctctgctaaggcgtgcagaagggaaatatgggctcaccgcccccacacagagtccctgtggaggcaccgcctagtggagctgtgagaaaagggccaccgtcctccagaccccagaatggtaaatccactgacagcttgtgctgggcacctggaaaagttgcagacactcaatgccaacccatgaaagcagccaggagagaggctgaaccctgcaaagccacaggggtggagctgcccaagaccacgggcactcaccttttgaatcagcgtgacctggatgtgagacctggagtcaaaggagatcattttggagctttaaaatttgactgccctgctggattttggaattgcctgggccctgtaacccctttgttttggccaatttctcccatttggaatagctgtatttacccaatacctgtaccccccttgtgtctgggaagtaactagcttgcttttgattttacaggcttataggcagaagggacttactttgtctcagatgagactttgcactgtggacttttgggttaatgctgaaatgagttaaaactttgggggcctgttcagaagccatgattgcttttgaaatatgaggacttgagatttggaggggctgggggtggaataatatggtttgactgtgtgtccccactcaaatctcatcttgaattgtactcccataattcccataattgtgggagggacccagtgggagataatttgaatcatgggggcaattttccctatactgttctcatagtagtgaataagtctcatgagatctgatggttttatcaagggtttccacttttgcatcttccttatttcctcttgccactgctatgtaagaagtgcctttcacctccctccatgattctgaggcctccccagccacgtggaactgtaagtccaattaaacctctttttcttcccagtctacccgatgtctttgtcagcagcgtgaaaacggactaattcaatgaggtttgcaaataatatcttatatctcatcattttaagcttataacaacactatttgcataaagaaacaaacaataacaaactaataaatatataattttttttagatggagtctcgctccgttaacccaggctagactgcagtggcgagatcttggctcactgcaacttccgcctcctggttcaagccattctctcaactcagcctcccaagtagctgggattacaggggcatgccaccatgcccagctaatttttgcatttttagtagagatggggtttcatcactttggccagtctggtcacgaactcctgacctcaagtgaagcacccacctcggcctcccaaagtgctgggattacaggcgtgagccaccacacccggcgactaataaatattttataccttaacttcatccccctgcttttcaacttctgtttctatttatatcttattgtactatgtcttgaagagttgttgtagttattatttttgacctgctcattgtttatcctttctatttaataagagtagtttacatcccacagttacaatgttatagtattccgtttttttctgtgaacttgctattaccactgggttttatgccttcagatgatttctttctttttttttttatttttttattattatactttaagttttagggtacatgtgcacaatgtgcaggtttgttacatatgtatacatgtgccatgttggtgtgctgcacccgttaactcgtcatttagcgttaggtatatctcctaatgctatccctcccccctccccccaccccacaacagtccccagagtgtgatgttccccttcctgtgtccatgtgttctcattgttcaattacctcctatgagtgagaacacgcagtgtttggttttttgtccttgcggtagtttgctgagaatgatggtttccagtttcatgcatgtccctacgaaggacatgaactcttcattttttatggctgcttagtattccacggtgtatatgtgccacattttcttaacatccttttctttctgattgaagtgcttcctttaggcatttcttgtgggagagatctggtgttgataaaatttctcagcttttgtttgtatgggaaagtctttattcccccttcatgtttgaaggagattttcaccagatatactatactagggtaaaagtttttttgttttgttttgttttgttttttgtttttctcctttagcactttaaatatgtcatgccattctctcctggcctgtaaggtttccactgaaaagtttgctgccatatgtattaaagctcctacattgtgtgctatttgtttcttttttcttgctgcttttggaatcttttctttatccttgagctttgggagtttgactattgaatgccttcagatagccttatttgggttaaatctgctttgtcttctgtaaccttcttgtacttggatattgatatctttctctaggcttgggaagttctctgttattatccctttgaataaactttccactcccatctttttccctacctcctctttaaggccagtaactcttagatttgcccttttgaggctattttctagatcctgtaggcatgcttcactgttttttattcctttttcttttatttcctctgactatatattttcaaatagcctgtcttcaggctcactaattctttcttacgcttgttcaattctgctattcagagtctgctgcattcttcactatgccagttacgctttttagctacacaatttctgcttgattctttttaattatttcaatctccgtgttaaatttatctaatcgaagtctgaattccttctctgtgttatttttaatttctctgagtttcctcagaacagctactttgaattctctgcctgaaaggtcacatatctcccttgctccagggttagtacctggtgccttatttggtgaggtcatgttttcctggatgatcttgattcttgtagatgtttgtgtctgggaattgaagagtcaggtatttatctctccctgtagccgccacagatgggaatgtgctgagtctcacctgaagccaccaagtctcggagtcttacccaaggccctcaacgtggtacctgtatattgctgctggttattcagggctcttcagttagcaggtgatgaatccttccaagatgggatccttcccttgaaggcagcaggttcccttctggcccagactgggcctcatgactctgaccagtgccccatcctgctgtgactgagctgttatccaaaatgcaagacaaagtcctccctactcttctctctcctctcctcaagtggaaaggagggatctcttttggatacttgaggtgtgcagtctggtgttaggagagcggtgataccagcactcccttagccaccccagctggtgtctcagtggattgtgtgccccctgagtctactggctctgggcccattgcgggactaggattggccttggaggtctagcccttgtggcctagaccacctttcaggtttatctagggccccagagcactttatcccattgtggcaagacttgcaggaactcaagttctgaccactgggatatcagtgattcccctctggctagggctggtctaaatgctccgtcattgggtagacgtcagctgagtttggtatgcttttgctttctgctataacaggacaacagtgagttcaatgcctcacaattgctacactctccctttccacagtgcacaaacgtgctttccataccacactactgcttcagggggaggggagagaggtggcgtttgtgattcaagactgtttttcttacctcttcggtgcttctttcagcaatatgaagttaaaaccgggtcctgtgagtgctcacctgattttttgttcttatgaaggtatttttttttgtgtgtagacagttgttaatttgatgtccttgcaggggggagggtacaatccatggagccttctattgtgccatcttgctccattccctcataactcattttttattgctgaataatgttgcatattatgaatgtaccacagtttgtttatcccttcacttattaaaggacacaatggttgcttccaatttttggtgctttgaataaagctgcagttttttgtgttttggttttgttttgtgactataagatttcacatcattatggtgaatgcgtaggaatggtggttgctggttgatgtggtaagactagtttagctttttaagaaaagacaaaactgtcttacaaagtagctgtgccatcttatatgcccaccagcagtgaatgagcattcctgtcactcggcatcctctccagctattggtgttgttgggtttttggatgttagctagtctaatgtgtgtagtggtacctcctggctttaatttccttgctttagttccctaatgaaaaatgatggtgaatgtcatttcaatatgcttgtcatctgtataacttctttgttgaggtgtctcttcagatcttttgcccattttaaaattattgaaattattttgtttaaattatgttctttgtaatgtccaatttaaaaattttttatttcacggatcatgtttttagtgtcttatgtaaaaagtcattgcaaacccaagttccctagggtttctcctgtactatcctctaggagctttataatttgcattttacatttaggtctatgattcatattgagttaatttttgtttgcaaagtacagagtttgtgtctaggttcttttttttccctttttcaaatggatatccatttgttccagtacaatttgttgagaaaaactatcctgtctccattgaattgtctttatttctttgccaaagatcacctcggtatattgctgtggatctatttctgggtcgtctatcatataccactgatgcatgtatctgttctttcagcaacaccacgctgtcttgattactttagctttatagtaagttttggaattgggtagtgtgagtcctccaggtggattcttactcatcagtattacctaggtcttttgccttcccaaataaagtttagaatcagtttgccaatatctacaaaatagcttgctgggatttgaattgggattacattgagtctatagatcaagttgggaagaattgacatattaaaaatattgagtcttggcgaagtgtggtggcacacgcctataatcccagcactttgggagcctgaggtgggaggattgtttggggttgggaatttgagaccagcctaggcaacatagtgagaccctgttctctgcgaaaaataataaaatagccaggtgtgttaccacatgcctgtagtcccagctacttgggaggctaaggagggaatatagtttgagcctaggaggttgaggctgcagtgagctgtgatagcagcactgtactccagcctgggtgacacagcaagaccttgtctcaagaaaaaaaaaaatggagtctttcaattcattaacacagattatttctccatttacttagattttctttgtttcatcagaattttacaatttttcacatatggctcttatacatattttgttagatttatatctacgtatttcctgttttggatgctgtcataaacaatattttttaaagttttaacatttacgtataatagttgtacatatttttggaatacgtgtgatgcttagatacccgcataggatgtgtaatgatcaaatcagggtaatcagggtaattgagatatccatcacctcaaacatttgtcttgtgtttgttttgggaacattccaattcttctgttctagctactttgaaatatacaataaattattgttaagtataatctctccattgtactattgaatattaaaacagtatttttttaaaaaacatcaagttccagttgctcattgctggtatgtgcaaaagtaactgacttttgtctgttaaccttgtattctgtgaccttacagtatttgcttattagttcaggagtaattgtttttctttttttcttttttcgttaatccagttctttcgtactttctatgtagacaagtcttgtcatctgtggacaaaaatcgttttatttatttcttcccaaactttatatacttttatttcccttaaaaatgtttttgcaatcgctaggactctcagtgtgatattgaaaaagagagagaacatctttttcttatttcagatcttaagggcaaagcatccatttctcaccgctaagtaagacattatctgtaggtattttgtagatgttctttgccaaattgaagaagtccctttcgtttccccctttttttttaagtttgtgctttttaggaactaaaagatttttttttaaatgtatacatatacagaacgtgcaggtttgttacataagtatacacgtgccatggtggtttgctgcacctatcaacctgtcatctatattaggtatttcttctaatgctattcctcccctaacactccacccccagacaagccccggtgtgtgatgttcctctccctgtatccatgtgttctcattgttcaactctcacttatgagtgagaatatgcggtgcttggcgttctgctcatgtgttcatttgctgagaatgatggtttccagcttcatccatgtctctgcaaaggacatgaactcatccttttttatggctgcatagtattccatggtatatatgtgccacattttcttaatccagtctatcgttgatgggcgttggggttggttccaagtctttgctattgtgaacagtgctgcagtaaacatacgtgtgcatgtgtcttcatagtagaatgatttataatcctttgggtatatacccaggatgggattgctgggttaaatggtatttctagttctagatccttgaggaatcgccacactgtcttccacaatggttgaagtaatttacactcccaccaaaagtgtaaaagcttcctatttctccacatcctctccagcacctgttgtttcctgacttcttaatgatctccattctaactggcgtgagatggcatctcattgtgattttgatttgcatttctgtaatgaccggtgatgatgagctttttttcatgtatttgttggctgcatacatttcttgagaaatgtctgttcatatcctttgcccactttttgatggggttgtttgggttttttcttgtaaatttgtttaagttccttgtagattctggatattagccctttgtcagatgaatagatagcaaaaattttctcccattctgtaggttgcctgttcactctcgtgatagtttcttttgctgtacagaagctctttagtttaattagatcccatttgtcaattttggcttttcttaccattgcttttggtgttttaatcatgaattctttgcccatgcctatgtcctgaatggtattgcctaggttttcttctagagttaggctttaggtgttacttttaagtctaatccatcttgagttaatttttctataaggcataagaaaggggtccaatttcagttttctgcatatggctagctggttttcccaacaccgtttattaaatagggaatcctttccccattgcttgtttttgtcagatttgtcaaagatcagattgttgtagatgagtggtgttatttctgaggcctctgttctgttccattggtctatatgtctgttttggtaccagtaccatgctgttttggttactgtagctttgtagtatagtttgaagtcaggtagcatgatgcctccagctttgttctttttgcttaggattgccttggctatacagactcttttttggctccatatgaaatttaaagtaattttttctaattctgtaaagaaattcagtggtaacttgatagagatagcattgaatctttaaattactttgagcagtagggccatttttacgatattgattcttcctttccatgagcatggaatgtttttccatttgtttgtgtcctctcttatttccttgagcagtggtgtgtggttcttcttgaataggtccttcacatcccttgtaagttgtatgcctaagtattttattctctttgtagcaattgtgaatggtagttcactcatgatttggctggctgtctgttattgttgtgtaggaatgcttgtgatttttgcacgttgattttgtatcctgagactttgctgaagttgtttatgagcttaaggagattttgggctgagatgatggggttttctaaatatacagtcacatcatctgcaaacagagacaattggactaggaagtccctttctattggattttgtgagatgctttttctacatcaattgatatgatcatatggtttttcttcttttagcctattgatgtggtggatcacattgattggtttccaaatattgaaccagcttcttatacctgattgtggcgtataattccctttatacattgatgtgctaatattttgctgaagattatttttccatctgtgttcatgagagatatcagtctactattctgtgttcttgtaatgtctttatctggctttggtattagggcaactcaagcctcatggaatgaattaggaagtgttcctctgaacctgttttctggaacagcttttggagaattggtattatttgttccaaaaatgtttggtataattctttgggcttgatgctttctttgttagcttattaattattgattcaatttctttagtagaaattccttcaatttcttttttttatagccctattcagatgagatgatgtatttctccttgtgtatattttggaagtttgtgtcttgattaaagaaatttcatctaagttatcaaatacatgggcagagcagtttttcttagtatttctttattatccttttatttttatttattttttaaattatactttaagttctagggtacatgtgcacaatgtgcaggttacatatgtatacatgtgtcgtgttggtttgctgtacccattaactcttcatttacattacatatttctcctaatactatctctcacccatgtccccaccccacgacaggccctggtgtgtgatgttccccgccctgggtccaagtgttctcattgttcaattcccacctatgtgtgagaacatgcggtgtttggttttctgtccttgcgatagtttgctcagaatgatagttcccaccttcatctatgtcgctgcaaaggacatgaactcatccttttttatggttgcatagtattccatggtgtatatttgccacattttcttaatccagtctatcactgatggacatttgggttctttccaagtgtgagctattgtgaatagtgccgcagtaaacatatgtgtatatgtctttatagtagcatgatttataagatcaatagtgatgccccctctttcatttctgatattggtagtttgtgtcttccttccctctctctttcccttttttttttttggacggaggtatttgggaagtgttttcaaaatacacatttgagcctcttcctatatctgcttccgatggaggtttgggggtgttggcttggccttgctttctttagcacatcccagagctcctgatgtatcctgtgtgaggctggagactgggaaccgttatacatctggatcattctgtttttagttttcaaaccttttcaggagggcactttcaggccatttgtgaatgttaatatgtgaaacagaaaaatgcaaagccattgtaattgatttgcgagaggaagagagagacctaaggatactgcctgcttggtattcacccctctcatctcaaggcagcgcctgaggaagccctaggggggtcccagagccccatctctggttctcatattaaataaggtcatgctcgtgaatgtatttgagggtggtgcttagcacataatacgggttggttaaaggttagctgctggtcttgctcttattgataatttcctatgattcataggcatccaccagtggagagggctgcctctcagggtggtcagtggattccctgtggccaaggaatctgagcagaagctgatatatgggagaagagagtagaggaccgcacagggccttcacaaagagccctctaggtccccttctgaatttggagatgcaggaattcagcctgtctcttcaccttccctcttcctagaacagagggtggcacaggggagaaggtggtgtgtcccagcacatccaaacctttccattggaaatcccaacgtcctctgatcacatccttctaggatcgtggtccatttcagtttcttacattgtttatctggttttggaaggctctgctctgaccaacgggggattgaacctgcacagtccagtgaagaggaagctggaagcggagaaggactacgtctttgacaaaaggctcagatacagtgtccgccagaatgaaagcaactgtcggtttcgagacatcgttgtgcggaaggaagaagggttcacgcacatcctgctgtccagtcagacctcggataacaatgccctgacacctgaggtaaggggtggcggccagagggaagggcaagctgggctgtggctccttctcactcagaatggaatattggctttctccttccttccatcagggagctgaggatggtaactagcgtgcataaaaacttgactgcagcgcgcaatttgctcatcattttacatacattatcccatttgatctttatgaccgtgtaatgataccctctcatcttatggatgaagaccatggggagagggactcactgaactgatcgtggacacagacttagccaaggggcagacccagaatccaaacatcacatcttgggcttttccagctaaactttgttgtcatcagcatgtcatatttgttggccgcagatataattcactcagttaatgtatctcactcagtttataatacatatatatgttactacatattgtatatataattgagacagattgatttcacataccataaatgtcacccttttaaaatgtacaattcagtgatttttaatatattcacaagattgtgcaagcatcatcactactgaattccagaacatcttcatcaccccaaggagaaacctcacccacatgaaatagtaacttcattctcctttctcccatgccctggaaaccactcatctactttctgtctctgtagatttgcctattccggacagtttgtatcaatggaaacgtgcagtttgtagccttttgtgtctggcttttttcacttagcatgttttcatgtttcatccatgttttagtgtgtatccatacttcattccttttatggctaaataatattccattgtatgaatagactatattttatctatcaccttttctatttgttcgacttttggcttgtttctacttttgatttttatggataatatttctacaaatgttatatacaagtttttatgtgaacatatattttcaggtttcttggatatatttctaatttctaatatgattttcttgagtctattccaattcttagaattgctgggtcatattgcttaccgtatttttcgaggaactgcaaaaactgttttccacagtgggtcccccattttacgttctgaccagtagtatgtgagggttctaggttctctgtatcctcgataacacttgttacgtctgtcttttttattatagcaatactagtgcatgtgaggtggtatctcattgtggctttggtttgcatttccctgatgactagtcatgttgagcatcttttcatgagtgcattggtcatttatctcttctttctattcacatcctttgcctatttttaaaattaggtcacttttctttctatggttgacttttaggcattctttatttactctagatagtaaggccttatcagatacttgacttgaaaatatgttctcctattctgagagttgatgttttacttttttgatagtgccctatgacaaacaaatttttaaattttgataaagtctgttttactgctttttctacattactttttaaatattaatcatgcttatgtcttagatgaataaaatagggaaacaatgaatacttaatgcagtgagattgacaacatcattcaaaatacagggtacatggcaggagaagggaacagattcttgacggcacaaaggtgggaagatgctccacgaagcagccttttcctacaagatgcctggggtagggcagtagagtggtaaatggcgataacagtgatgacagccactgaacaggggctctttgttccttgtatttgctgtttatctcatgtcatttcgtcacctcccttctgatgtaggattgttatgatccacattgtatagatgagaaaatttaggcttaaacaacccaactgggctagggtctcacagcttaaccaagtaggtgccaggagggcaggggttctgttcttgctcgcccttttgtctcttctgttcatcccagtgccaggcccactgaagacatttaactccgagacccctttttctgtccttgcaatatcctgtattctctttttcataatagcaatgggaggttaatgagaagggtatgttttggaggatgaagtcaagggatggccactcactcacatcgggataatagaatgacctagcattgtccagtgtaccccgtaccatcagggaggcataggaagtggggtggggagggaggtgctgtgctcttgaatttgtgattgcattattattatggttgaaatagaccctggttcttttacggggttgtgggtgcggccatctggaatgattgacaaatggtgagggaagcactgtggctaaagctttggggttgtggggtagtggttgtgtgctgccccttctctgagcatggtgttttgggggcctctccatcctccgcctgtaacagaagcatccctggggttctctgctgtgtagacctctgtgtgggattcaaagaagcccagagcctgcagtccaccccgaaagcagctcttcatatgtttatacacctggaaacctcattattttaagctcatcatgacatctgcagagaccagtttttcctagattctttctacttcactactttctaaaagcgtgctctaaaaaggcacagcattttctttcaagaaattgaacacatgtgaagtctccagttcattccctctgtggagcagccctgggtggtaactgttgcccactcatcatggaaaacatgttgtgctcgtctgatttaaggtgcacaggttctcacctcctgagctgcgggcttggttaattggggttcctgccctaatcagtgtcagttggttacagaacaggaggaaaacagtcaaagttattgatctggtattttcagctgtctcaacaactgaaggggattgagtatgtgggtgagccagctgactgggtaaagcagcccgtaatgaaggtcctactgaaatgaagaggctgtgtgagaggaggaatacaggttttagtctagcagacctggcttccaatcctcccttcaacttaccatgctgttaccttgggaagttactttgctgctctgagcttcctcctttatagaaattttacagtattttgctggcaagattagagataatgtatgcacaggagcccacaaagtacctggcatataggaggtatgtaataaatgttcccatcattgttaatgggaagcagaggccatttaatgtccaccagcagacattgccttgcttgtgaatggaggaaccagaaggcgaccactttcatggttataattaagttgctttttctagttgtatgtgtaacattggttggattggcctcatgggcagaaattcatacattactgtgtgcattaagtagattctgaagctagtgggtttgctgtaatatttctcctgtctgggatacagcagagaaccaggagatgaacagaaatgccccttaaggaaagagtcagtgaaacagatgacacagtctccttgattgaaagcttatccacttccccattgggagaagactccaggtcttccttcagtgcccttggcctcagcccacaatcctaccactactctcaggaacacagcagacatgcaggagtcccttttcacaccgctcttgtcgtggccccatgtgcaaacctgtctcaaggccggttcacctttattcttgaatagctctttcatatgtttacttctatttccaccataaccattacagtccactactaggctattttgtctggactgctgtaattagccgtctcataagtctgcctcctttcatgcttcctgccctgtaatccattctgcataaggcaggcagaatgatcttccagaaatgcagctgtggccaagtcaaccctttatacacacacccctccccaaccaaatgtgtcgatggctcctgattaccctggctgacagtcagaaccctcagcgtggtgcagtcccgcctcatcgtgcagcccacctcacatacctgtcctcctgtacctcagtcacctggtttgctttcatgcttacacctgccccggggcctttatatgtgctctgactggaacgggcctttcttcctccttgcttcactcactcttgctcttccttcaggtctcagttcacccatcacttgcacaagtcttatcacagttgttagtctacatgtatttgtggggtgacttgttaaatgtctgatatcccccccctcctccattagactgtaaacttcttggggataaagactggcattctcttaattcagtaaacatttgttaaattcttttatgtgaaagggtctggactaggtgctgcaagggatataaagatggtaagtatgctattttagctcttgtgggattgtattagttatctataactgtagcagattgttttaaacttagcattttaaaacagcacacgtttattgtctcataattgctgtgggtcaggaatctgggcatggctcagccagatgcttccagctcaaggtctcttacaaggctgctgtcaagtggaggctggggctgcagtctcacacgaaggctcaactggaggagaattcacttccaagctcacccacgtggttgttggatgcatctgtttcctgccatgtgggcctcttctgagggctactcatgacaaagcagctttattccctcagagcaagaactccaagaaagagcaagagaggatgatccttttgtcacctattctcctcctgaagatgacctgccatcattttggcatcttctgttgaagccagttgctaggtccagtcttctcttgagggtgggatttacagaagagtgtgaatacaaggggtttaaatcacacagaaggcaagatgcagtaaggaggtgcacattctacaagggagtttgtcagaagaatcacaacaaggatttaaagtattcagggttttgggagaagggagagtatgcatctagtctagggtatggggaaatctcccttgaaggtggttgcatttgagataggcctggtgtgactggatttcagcaggtacagatgaagtatacagagaaggaccctgattgattcctcttttacatcacattctaattaatttggttatctgggtgtaaacccacgccggatccaaagctagaggtcatagagggggagtctgttctctccagcagacaactaatagcaggtgcaagtgacagctaggaagtgcataatgagggcaatgaatgtacaggacatatttaggacttcaaaatgcatagcagtctgggactatttgttatagaatcacatcccagaagcctctaagaagaattttctgttataggccagcaggtgaccattgagaggtagttatatgcatacagtatattctgtttaagaaggaaacagaatgtggactaatttcggaacattttactttaaatgaaccagttacattattaaatttggggtctttcaagaaggtagaatcttagccatctgtccaaattgaattagcaacaccaaaaggaaagaaaagagatataaactagatataacttttttaaaaatgaaaaacagtatagtttgtacttttgtatcaataaaatgcaaatttattttcagtttaattcataaatgagatggctgttttgtttggtcttttatttattttttcttaacgaattgagaagtaggtaagtatggccttagccagagaagctactctctgagtcatctatagaatttcagttcacctctttacagcagggtttctttttttttttatttgcctctcagagaaatagagttcatgtataggtgagagtatatctatttctggaggcagatggattaaaggacccacaagatagtggcctgtgagcttttttgatgttcaaaatgaatatctgttgcttatacccagataggctggaatgtgcttattccatccttccagcagggcacagggctggagattctcaattcagattgacatccagccctgttttttccaccaaaatcctatccattaaaaaaaatcatccaacagtataaagtaggagaaagtaaaggatggttagcatgagatttaaatcatggtcgtgcctcttactgttggtgtgaccttggacatcttactgcacctgtctgagtcttcatggtgtcacttgcaaggttgagataccatctcctaccttaccagatttttgtttggaataaaattcctggtgcaattcctggcactactaggtgcttaagaaatggaagttcttttaaaactttaaccttaaaaaacagtattttcccagtatccccctaacttccatacaccgtgatgatgcctgtggagtctttaatagtgatcctttggaagtttgctcacttatcatctcttctgttagcctctaagcttcacccaggcacacgccatgccttgttttctatcactatgtactttctgctcttgttttaacaatccagtgattgggtgttctttattttatcctcctccccattcattataattcatgtatttttaagaagttatccctaaattatatacacatagcaaaggctaagagtaactacctccaccacttccgaatataaccttgacatgctccaaccctagtcattcctcctctcatcctctacaatattattgcctgctactacagttgtacgccataccaacccctgccctcaaattaatgaatatcagtattatgatttttatagtcagtttttttttattaacaacacattcaccaattttttcctttttttttttttttttttttagatgggatttcattctgtcaccgaggttggagtacggtggtacgatctcggttcactgcaacctctgcctcccatccttctgctgaagagctgggaccactggcatgcaccaccatgcctggctaatttttttttttttgtatttttaggagagttggggtttcatcatgttgcccaggctggcctcgaactcctgagctcaggcaatctgcctgcctcagccttccaaagtgccagaattacaggtgtgatccaccaatttctttgctggttattattccttgcaggtcagtttttgtttctgaatatagtttctttttcttgaagtacattcctttttagttcttttagtgagggtctaaaaatggtaaacattctttgactgaaaatgcctaatttttacccttccttttaagtgaatttagctgagtgaagaatttgttgacagttgttttcctcagcaccttgacaattgtattctgctaccttctggaatttatttctgctatgtagaatttgcctccggttaaatatttgccctctgtaggtaagctttctttttcctctggatgtatttaaggttttgctttgtctttgatgttctgaagtttaaatatgatatgtctgtgcttgcgtgtattgttatttctattgcttagctttttgttgtagttcttaaattttagtattcaagtctgtggtagatagaagccctctccccaagatgttcatgtccaaatctccagaatctatgactatgctaggttccatggctagggggatttaaggtttcagatatacaattaagggtgccagttagctgaccttaaaatagagagtattctagactacctggatgggctcaatgtaatcacaagggtctttaaatgtagatgagagaagcagaagaatctgtcagagtgacacaaactgagaaggtgaggaagacccagctcggcattattgcctttgatgatggaggaaggggccaggaaccaaggaatgtgggtggcctctataagctggaaaagggaagaaaatgattctcccttagcgcctccacaaaggaatgcagtcttgctgacaacttgattttaacccagtaaacctgcatcagacatctgacctaagggactataagataataagtttatgttattttatgctgccaaatttatagtaattttttacagcagccataggaaactagtggatctttcatcaattctgttaaattctcatcctttatctctttcaatattgactttctcctcttctctgtgatctcctgatagaatccctacagcaccaattttaaatcttagcattcttgtctttaatctctccgttatattttccatctctgtttttctgtgctacgttttggtcaattacttcaggtctttcagttactttatgctccctttagcaccacctaatctgctgttgatctcagcagatgtccatgactttgtttttcatttccagaagtttctttttctcctcaaatctattttttccccatattctcctgttctttccttattgttcatgtctgttttcctctctgtgattatttgaaacatccctattttacagtctcttttggatccttgtattacttgaagtcatgttatgtaatccgctcatttgctgagtatgccaacttgtatttcccaagtgttttgtgatttttgattgtgagctcatctcctgctagggttttttttcctgtgtaattcccatgcggtctgggttgcagcttctccccagagtacttttacattcatttccatcagacacctcagggatattactagcctgtgtccaatttctgtgttaatttttttatcttgtggattcttccccatgtgggtgtggtaactcagaacttcaaatccacatacagggcaggtatggagttttagcttctcatgggagagttttcctacagcaaaaataaattatttgctggagtggcttgtcctgactgtggtatggcaaataggtagcagaaggactagaagggctgagcctgtttgtggtaaagccgattccatcataggcttcctgtctccaaagcctgtaccttttcagcctggccaactgccttgagtccttgtgaataccaggcacccaagagacattgtgtagtctagatacgcagtgttgctgcaaggttgtgattggaaggagtcggggagtatgcaggggtgtgagggggattgcttcagtcagtacacagacttggagggtctggatgatgcttgggcctcagaacgtagcatgtggcaggagctcactttcagatcctggctccatcctaaaatccacagtctgggaggggagaaggatctgctttcccctgggcatcacagagctcatttcctgctgctcccgtagccacactgctatcatgtggaggtcttcagatgaaaagccctgatgctttgagaggcagcctagcctgcggtgaaggacatggtccccaaagtctgacttcctgagtcctagtctagctccaccccatacttgcaaacttctcacagtgactgtactttgattttgtcattcataaaatggagcttcaacaagtgactcccccagaaggctaagtgagttcatatcgtaaagcagcacttctcaaacaataacatgcatatgaatttcctgcaggtcccatgaacatgaagaaactcatcctgtcggtctgggctggggtccaagactctgcatttctaggcagctcctaggaatgtgaagctgctggtctaaggaccatactttgagtagtgaggtttgaaagtgcttggggcagaagctgacctgttccgtagggtcagtatataaacggggacatcttgcagggtatgtgccatgcactgcactaagcagtctacttgcatcttgtttgttggttcatctgaggtagctctgaattttacaaatagggagaccaggagaggctattgatttcaccccagaacacccaagatactgtggggtagaagtggagcttgtgcccaaccgtagccccagaggcgcatgtggaccttctggaaccccctgtcatacgtcggggctggggctttagactctgcatttctggccacctcctgagggatgtgttgctgctgttccaaggactacactttgagcagcgaagtttgaaagtgcttggggcagacagagcttgtaccatctccgcaggaagctttgagctggccagtctgttagtgcaggctctgccacttcctgacatgttgctttgagaaagtcacctttctctctgagcctcagtttccctttctataaaatggagctaataataatgcccacctcacaaggggttgggggtgcaagtactcatgggcaagtgctctgtaaccttcaggctcatccaaaaatagttgctcatgtgatgaggagctgaatagccgggctgcatgcctttgaagagcgcaaacacagttagctttcatggggtgcaaactttttggtggcaaactctttacagtcttttaaatggttttcacaggtgccttttgagttggccttgtaaaagcttctaggtgggtgagcaagcagcctgcctaatttcctctgaagttgaggaaaagggctatgagggagtttctgtgtgactaaacaagcagatactgagtgtccaccataccccaggcactgtgctaggctctgagtatacactggagaataagagagatgcaattcctgtctttattaaaataacagttgagcaagtgtggacaaataaaaggcaggaaacaaacaagtagtaggtaagacaggtaaatgtatgataaatgaagaaaacaaatgggggtgctgggcaagggagaatagggggaggagaatagggtgggtcataaaaggaccttcagaatcaaggagcctgggcaaccccacaaggggtggggagattggcatgtgcaaaggtgattaggtgaatataggcttggcccagggaagacgttcaaagaaggctgcagggtggtaaatgggagctctgggctctcctagctgccccacccctgcctgtccacccctgggctggctgcgtgctctggggctgagtcctctccttctccataaatggaaggccatggccagatagtgggaatttgcagtgtcaaagtgcatagactaggcattgtgtgagccaggccagggctcaaatccacctctaacacttaccaactgtgtggccttggactagtgttacgacccctctaggcatctgtttcctggtctggaagtaagaatagtgaccactcactggtgttggggaggctggaacccatgtagcagggtacctggcctgcagtacatgttcactgctaaggtagcacttgttggtcttaccacttaccgagggcacctgtgtctatctcccaaattctgtcctgccctccacctgcctaagacaaggtcatagagacctaaaaatcctagggcatacatgcaggagacccaagcaggagattaggggaacttgtcccatgatggcagggtggccagcacagttcttccatgtcagatggcacctttactggcatgaagaggaggaacaaaatgccttttatccagaattcatcactacctcccaggaatgtgaacctgcaggtggccatagcataacctttcctttcatttattcttcactggaggccttgagagtgggtccacccacttatagatggggacattgaggatgaataaccagcatggctcaggtcccatggctagtaaggtgcagagccagaatttggaccaggggcttggaactccagtgggacactgaacccaggtctggatctgatgccaaagcccacttgccatgtggcacctgcaggccgtgcggggtatgagctggaggaaagatgagcaaggatgtataataattaaattgagtcatctagagatggcttacatccctcacttgggctgtgcatggattttttccacatcttgtaaagggctaaataagcaaatgccagaacaagatttgcagagatttaccaaggattgagtgactccaggccaggcttccagatctgcagccagtgaccacactgcctccttattagcactcttctgccttctccggggatggtgctggagggctttggctatgataagtgtttttctccttgctctggactcttgcttgtactcaggggaggctccctgcacaggcagaagcagattccctggcctctaccctcagggggtcaggcctctggctgtcttgcagtctgaaagccccaggcttacaggatagacacttaacatccctgcaaattcatctctgccggcagatcatgaaagaagtccggcgagcgctctgcaacgcagccacagacgacagcaaactgctgctcctcagcgcagtggggagcgtgttctgcagcggcctggattattcctacctaattggccggttgtccagcgaccggcgaaaggagagcactcggattgcagaagccatcaggtgagctgtgctccttttcacacaccctggggtcctgcgtaggattaccaagtaaaaatacaggctgctcagttaaattcgaatttcaaacaaccaggaattttatttttagcataagtatatcctgtgcaatactcgaggtctgcttacatttttaaaatgttggttatttatctgaaattcaaattttaattgggcatcctatattttcatctctaaccatggtcctgccaaaattagggatgctttgccctctaggttagatcccactttcattcttttgatcggaaagattttttatttgctatcaaggcctgagtctggtagtggccatgtgttgtccacactactcccgccccttgcctgatggggagagtctctggttgtctggttgtttgtatgtcccagcactgccgtagctcagcagtggggaggttgatggaggggttccctgggcagctgtgtgtttgcagacccaacggggtacagagtatttccccctttctaattgcccctgggcaaaagttgggatcctggcggtgacatccagtcccaacaatgagtacccttttgggacactgaagggtagttatttccccattctttatcagtatatcaaaagcaagtgagtgtcatttctagacactacggctgtttagctggtttacagctgtcacccagtgttcacctggcgggtgctgctgtatcttgcttaggaatcagacaagtcacaattcaggaatgcccctggtcacatgagaaggaacatttactccacatggtgtcacggagcctcaggccacaagtcagggattttctggggcctccagtctctatggttctgtggaggggccacacagagggaggctgattcccacgtggctatagggggctttgaggggttgctttgtctctaagaggtgatgctaggatgctcttgtgtgtggaattctgagtccctcttcagggtgaagcagccattggagcccctgctccgaaatacccgtgtgtttcctgttgcagaatccttgccagaagagacatgacgagcctgggcactgttatgtgaaaggtgttgtggttatggaggcacaggcttcctggctgtgcccacacagtttgcgctttgcgtggtcccagctatgccctctcactactgcctttccatgtatcaaagggggaccacaggatttccagcgtgcttctctcgtcatgcatgaggccaccagagcccatccagagaaacaagtgcccatttttgtgacccgtggagcgtcaatcatggtctttatctggtttacacatttcagtggaggtgttagctggatttccagaagtccagggaaacctggctgacacagcccctcgttttcactccatgcacgagcagctcattagcatgcagaccccttgtagtgagttgaagtgtggcccccaaaagatatgtccacgtgccaatccctggaacctgtggaggtgaccgtatttggaaaaaggctctttgcagatgtgattaagttcagagtcctgaggtgagatcatcctggattggagtgtgggctccagacgcagagagaacttatttcataagaggggacacagagacaggagaaggtaatgtgacagaaagggagagcgtagagtcatgcagcctcaagccaaggaactccaagaatggccagcagccaccagaaactgggagcgaggcctgacacagcttctccgtcagaacttccagaaggaaccagccctgccaacaccttgagtttggagttctggtctccagaactatgagagaataccttttgattgttttaaactgccaagtttgtggtgactgttccctgggaaactaatacagcctggaaggaaatcattagcagctcaaagagccccatcttttcaggctctcctcttaggcaagggcccatcctgacctctgcccaacgtcctcaatggctgctccttctggtgggcagctcttcacctttgctggatggggtctgttaacagattatcctggacagctgcaggcaaggtgggactcccaggccagccctgggttgacggtgatgaggcttgtcccagcctggggagggcgtggggatccttcttgcatgcaggaataaggtattgtagctgggtcactgaagggatggaagctgaacagaaacagggtacccagggggtcaggtctcatgatggatttccccagagcccccaccgaatggttccttcctgtggctttgcacgcccagtctctctggtgagggaagtgtctccttgacctatccctgcatttgtgtcttagatgtatcaaagctgaggggcaaaacctcttctcctgtccccatagcctctacccattggggtctgctgcgtggtatctgtgcgtctctggactcttgagaaccaaattcatggagaaagaggtgtcagaggcagatgggattgaaaacatcagctgtaggagaacgtggctggggcctgaggcccaaactggctcctgactttcccagctgagtagttctggggaaacatgactagtggaattcagacatttgccatctcagcgggcaagtgagctccccttaggcagagcacagggcaagatggcggaggcaggaggaattcttctcgatgcttcaaagggagcagaagttgctagttcatgaactagcaaggatgggggcgtgggaaaggagatgtcccctggaccactggttctcagccctgacagcacagagaggcccaagggagcattcccaagaccctgatgcttggcaacacccccaggggactctgagttatttaggctgaggtggggccagcgcatcttttgatgtcagtcgtccttggtggttctcaggtgcagccagggttgagaacacccgccctatgctaaccagatttctgcaccactgattgagagcactaagagaaacgcaagattcttatttttatgcaagagagtaaaggtggttattaaggggatgagtatgaggaaagaggtgatacaggcatgagaaaggtgaggacgatgagcgaagatggatggaagtgcagaagatgcggcgtgtagagacagatgctcccggggttagaaagagactgtggctcgcccatcagcaccaaactcttttaaggcatctccagctctcccaactcgggagtgctgccttggaggccacactctggagttggggacacaaggtggcagtgaagcattctgcacagaacgttttgtggatttccagaggggtgtcctgagagaagcgcactgtcattgaaaggagcttgattcatactgcaagttctgtgcctgctcctgtggactttctaggtgtattagcatacttacaagaagtctcttgtgaaagaacttccttcaaaatctagcagggctaaaacgttgtttggacatagaactgccaccatctcttctcttgggacacgctcctggtagggctgaccaggcatgccgcatggccttggcaccccgtgagtggtactctcaccccctcctcatccttgcctaaagaaaacttgcatacacgtgactgggactggtgactgggacgcatcactctgcaaatgtttgatgaatgaactagcagatttggggagagctcaggtgaattgttcagaaggctctctccaggatccatcctgaaaagagtctgcctcctctgaacttgtcataggtgacaaggtggcttgttcaaacgtggtattcaggaaagcagtgttggctagcagctgcccacatggcccctggaagcagaccgcctgagctcaaagctgcctctgcacttgctggtggtggagctttgggtatgtcatggatctctctgtgcctattagctcatccagaaaatgggaacaatcaaaatgatggtactggcctcactggtgtgttgctaggataaagaataaaaagatactctgtgtgaaacactcgggctattcctggcactaatatgttcttggagttcttattatggttgttgtcactactgctggtacttccagccatgacttctagctaagctgagtctaagaccagggagtgggcgcctggactaaggggtgggttggagactaaggagtggcctgccagggacctctctgggggccccaggatggtggtcactgtttggtcccgtactggctgacttggctctgagctttggctgggggagggttctcctccatgcctctggttaaagggagttgggtaactgggtcacaggagaaatgccgattgctccaggggaaattgaggcactcctgtgagcagaattttgctgctgggtcacctgtagcctaggagaatggatcacagaccaatctgagaattgaatgaggactctgtccaccctccccagcagatgcactacccataataatagcagcagggatcgcgtgctccctgcatgtcagcactgggctagcaccctgcatggaccgtctccttggattcttattcagctccctatctggggcaacatcattgattttcccattttacagagggagaaagtgaggctccagagaccaggcaccctgtccaaggtctcaccattagttaggggcagaactgagacttcactctgagtctttcagattctgaagttgttgctccttctgccacatcagtgcagcccagcagctttgtcaggcagaagccacaggggtcgggtagagcagaggaagctgtgtgggtcaggtcagcctgatggccttggatgtgggggaaggtggcgtacagttttccccacgcagccccgccatcgcagaaggatcagatatcggagctgcagggcccgtaatgcaatatcctgtttgctgcttggctcccagtgatagagatctactgcccgaggtgagagaaagaggatggggggtggccttcattaaacatcgggtgacattttcatatcaaggaaatgaagtgcgaggcagattggatgacacaggaggggctggggcggagggtcagagctctgcacgcctggtcccctttcccttgcgtccctgattccgtttcatggatctcaggttggaaaacacagaatgaaaggctctggggtcctgcagaggaaagctctggaaagtcacaagggctgcagtccattcctgaaggatgtcatgtggttgatggagctgaggtggcaacagtatcagagaggcttacaggagacccacagcagggaggctgtcttgacaggcacggaccctcttttattaaaaacgtccagcagaggcggaatgatgcatcgttggaatgttatggagggaattctgcaccgagtggaagatacggtcccatgagtcctaaagtccttcccacctctgagatctaagactctggaattgtatgaggtcactcaggaatgggatgtttgacaaaaatcatccaaacccctaaggattctccaaaaaagtccatatcccccgcagaccccaaattgctttcagtgaaaagcacttgcaaaaaccagtgacctaaccgaaaacctcaccattaggttaggaagtgagtgatgtcaggagatgggccactggaataccaagcttcagaagtcatggagccagaactccctctctgaagtagtaccttttgggggccagcagggactgagagctaactccaccatcttagggaatgtgatgcctcaagcatgagtcagaggcacgtacttttatgatgacttacatagatcgtaagataccttctacccccgcagaacattaagtagacttctcgcagttgaatctgatcccagtatatcattatgatatccacaacttttgataagacttgggggaaggaacagtattgattgagaagagataaatcagctcaacttttttttttttttttttttttctccctgagacagagtctcactctgtttcccaggctggaatgcagtggcccgatctcggctcactacaacctccacctcctgggttcatgcaatcctcctgcctcagcctcccaagtagctgggactacaggcatctgccaccacacccagctaatttttgtatttttagtagagatggggtttcaccatattggccaggctggtctagaactcctgaccttgtgatccatccacctcggcctcccacactgctgggattacaggcgtgaatgaccatgcccagcctcgacttttgtattagttaagtattagctgttgtaacaagtaagcctcatatatagtaatgtacttctcacatacatgaacctaaaatagatgtcaccatcagcctgtggctgtcttcccattggtgactcaggaacctagacttcttccatcttgtggctcggcaaatgtcttccaagactgctgtgcccatcaagatgaatgggcttggaggacgccatggtgggaggtttgatgtgcacctggaagtggtactggtgggtttttgctcacatcctgtttggccagcacttggtgacttggccacagccacatgcagtcggagacgggaaatgtggccggccagcagacctgggaagaagagggaaaacaggtttggtgaagagctggttcaccattgccacacctctgcagtctttgttcttgttctgggagactcatgtatttgctcaacagctgtttactgagtgctaattccaatattgatggaagccaagcggtgccccaggcagacctctgggtgtccttaaggagctaaaggggaagaagaatccaaaaacaagcaaatagttagggtgattgcaaattctgataatggtgtttttctgagaactctcagaggcccatgtggctcatgcacagtgagcaggggcaagagtgatgtgagggaaacctggagaggtaagctgaggcaggtcaaggtcaggccaaggtcagaccaacgtaatgggcatttggattttattcttgtgagttcttatagtttctaatctttcctctgaaagtaacgaaggatgcagactttactagacatcttgtgtctttcctccatgtccagatgaatattaaaattttatagatcatacatagcaactaggaaaaggcaaaaagccttctgaggcaaaggaaatacaggtcattgttgatggctctgtgtaattggtaaaggtacatgccttgctcagtgcagaagggcagggagagaaaatattgcccagtcttgtagccaggattgtagctccttcctacagggaacccaattttagtcagagccatcctaacatattcagcattttagaaccacccttgatgagtctggcatccctgcaggtaattcagaatcagaccatcctaggtgtgatttttgaaagaaaaatgtcatcaatcccaacatgtacccaccatctgaagcttgaagtccctctacagcatcacccagcataatcattgagctaaaatgcaaatacctccaggaatgaggaattcataccccacaaagccactccattcacctttggccagagatgttagaacattctttctctctttgagttgaaatatgcctccctgttacaccttccctgtggttctgcttctgcaccttaacattcaggttgacttccttaggatatatagaaattctgtcaatatctagggtgcccatataacttactgtgtaagctatggcttttgagagtggaaggagatggtaactgggtgcagtgctaggacatggggcatgaactggggcaatctgagcaaaccaggacatgcagtgaccccatcagtatacctcagaaaatctgacagctggtggttccatgtccaggcaatgaggcccttgcctggcacctctaacctctgacgacctgagggtgctcctcacagcacctgggagagtcaagggttccagtggggcttagcatgctatagtcacctgttcaagaggatcttctttctctcccagggactttgtgaaggcctttatccagtttaagaagcctatcgtggtggccatcaatgggccggccctgggcctgggtgcctccatcctgcccctctgtgacatcgtgtgggccagtgagaaggcctggttccagacgccctacgccaccatccgcctcacgcctgctggctgctcctcctacaccttcccccagatcctgggcgtcgcgctggtaagcctcctgtgatacctggattcgggtcccagcaggatccttcctctgccttgggtttaggggctcttcatggggctagaaacctgagggtgttgtcagcctgcagattggcttggctgcctcatgtccttcacaccttcagtgccagatggagtagcccggcctgagaagatggcgatgatgtcagtgtatggaccatgcactctgcatggcgtctcaattattcctcactccaaccccctgaaggcgtgtcttaggattggctgggtgctgtgacaagcagcccacggtctcagtggctttaacaacaaaacttgccttcatcctcttgagtggtccagcataggtgtaggggccacccacactctctggggacccaggtgtctcccgtccagtaaatgtgccctcacttccagccaatgggagagaagagagagccagaagcatcaccctggagggcttcatgggccaggccggcaggggcgtcttcccctccactcatgtggtattggccatgactcagcttctggtcacatgcgcctgcaagggaggccgggagacgcagcccagcgcatgtccagcaagaagagggaaaggattcagtggacacaaagcagtctccaccccatgtggaaacgattgcgatttccatcttacagatggaacgttaagctcagagaagtcgtgtcaccaggtggggcagacagagccactgtccaacagaggcggcggagtccactgtaagctgtggtcagattctgcaccaacatccagaagcaagtctggacaggggagagcactgatgacagctggcacgtaggaagcacttgctgtgtgctgggctgggctgtcaacgccgtccacgcccctgtgaggcaggacagctgtgatccccattttgcggatgtggagactgaggctagagaggtttagtgagttgtctaaaggcatgcagtggtagtgccagttgtgggatttgagcacgaactggctggttccactgtctgtgctccgaacccagcctgttattaaataggtcccacatctgaggggttaatctgagattagctgtcaggaccagggaggggttcagaacatgtagctggtccgagtaggcgttggaggcaccacgctgctgggtctgggcttcctttgacggctcctcccctgtggactctcaggcagcctctgctgttcagagcagccacaaactctgaattcagctctgatgggctaatccttatttcataagcacgggtcccatctggatctcagaaggttctcagggagtcccctccttccagccccctctagccagtcagctccctttttcctctccctttcttcaaatactgcaaatccactaagtgcccggctcgccacacccaccaggagtgcaggggtgaacaaaaaccctgctcttcagaccttctattccccagctctctgtcttggaaggaggtcccaccttgttcagagaggacccctttgagcaggtgacatttgaacagacgcaagaattccaggcagaggatgcatgaagggaagaacagggtagggagtgggcctggcaggccctgggttgagagtggtcaggtcagtgtggctggggcctggtgaggatggtggggagagggcgagggatgaggccatggcagtggcgtggagtggcccctgcgagcctggcatgccggggagggtgctgggccttctgtgttgtgcctgcctcagcaaggtctgcccggggtccactgggggcatctgccagcagatgtcataggtcataggagacccacaaaagtgccagagaagcaccccttaggtgacagggccaaactctacaaccccagagaaaaagccgagtgctggctcccggccctgcaaagtgtgctgggagcttggtgctgtcatcatgcctcttggacagcagagaagattgtggctttgtgacgttaagtgacttgcccagagtcacatgccagtgactaaactctgtttatgttcttgttttcttagctctagcatgggttttttgttaattttatgggtcttcaccagggacaccctacctctgcccaagaatctcctttctctctgagtccttaggcttctggataatacccttaagttccctcttcaaaagagagcagtccattgtggccccacggctattgtgaattgttcctttttaggaacagactccaggatgtttcttttgatgtcttgattttatcggaaggtcaacacccacctttgacattactctcatgctcttgaggcagctccgcacattctcaggactgtggctgttgcacctaggcaagcacctgtggaagggcaggtgcttttacactggatttcttcctcgtcttcctttgcagttccatcccccattgtttccatctgagggcctgcaagcccattcttctcatctctcaagtcctgcttttgttgcaatagtgaggctgataagcattgtcccttttccttccttgatattcccccttgttctgttttgaaaataacatcaccaaccatacaaaaatagcaaatttttgctaccccttctgcactaccaggccctgttctaagcacctctcagttaaccttgcctctgtgctgggagcttggtgctgtcatgatgcctcctggacagcagagaagattgaggctttgtgacgttaagtgacttgcccagagtcacacgtcagtgactaaactatgtttatgttcgttttcttagctctagagtgggttgtttgttaattttatgggtctttaccagggacaccctacctccacccaagaatccccctttctctctgaatccttaggcttctggataatacccctaagttctctcttcaaagagggcactgcagggtatggtgtctgaggggtggccaggagcctttccgtatgaatgggggcctcgccttgtaactcacacctgccagggagtagcttccagtggatctgaatccaggttcattggagcagatatggccatttgccccttctcccagcgaacttctgctgagttcatttgactgaggtgttcttcagaaagtatcaagtcctccatttgtgttcaaatcttgaaccaagcaagcatatgctaagacttattatcgacataaaagattgccctctactctggcgtgaaagattgtcctctgggtcatcacgaaccatcagtgacacaaccagaactcagtgggggaacttacgcatagctctggaggcctgagagtgcctggcatttcagcgtcaacccgagaggagctagcatgtagaggcaggagagaagagcaggtggggaaggcgttgccggccgtgcggaccctatcacatggatttgaccattatgccctaattatcagtcactgtctgtcagttgcagctcattactatcatgttctctgtctgtgcaggactttatctatatagctcctcccagaccttgtatgacagctgaaaatttcaaagcaaaaggaaattctctggggagtgtggtacagagatatcccaggtcaccagaccccagggaagattgctctctgcccttcaagactgggcagtgcccttgcccagccctgagctgcttggagagatgcacgtctctgccttggtattgtggtgttattcacgacctttttggctgccagtgatggaagtgctttaaccagtttaatttttaaaaaaggagcttaatggttctcccagctggaaagcagaagtggcagttcccttggggagacagggctggggaattcaagtaccatcaggtctctctctctttctcttaatctttctctctctctctctcttcccctatttctcctttccttgtagccccacctctccacaggccgggacacagccatggatggtccttgggctcactgatgttagcctgcagtcacagaggaagaaagacttttccaccacacctgcagctggaaaccccacttgagctttattatctagaagggagcatctctttctccctgggctgttgtgggctgtgtgcatttcagtgccaatgatgtcatcacggctgggtcatcggctctgaaatcttcccaacccacaacccatgcccatgggtctgccaccagaaatggggaggggtgtggggcatacagagtcacagtaaatacacagctcctttggggaatttaatgaaagctgtggaccttctgctcatgcacacgaacatttccatacaattcccaaagcttatctgaccccaaaataagataaggatctggaaggcaagatgccttccagaactgggatggttgcaggtggcaagccctggaccagctgagggacatgggtggacctccaggccctcagtctttgcctgcttttgctttttcaggccaatgagatgctgttctgtgggcggaagctcaccgcccaggaggcctgcagcagggggctggtgtcgcaggtcttctggcccaccacgttcagccaggaggtcatgctgcgggtcaaggagatggcatcctgcagtgccgtggtgagttcctgcgcctcctgcgtgcttgtccttttgatagacccattttacacatgaagacagcaaggctcagagggcttcactgacttgctagaggtcgcacagggaataagcaaaagaccctttgcaatttaacaaatgccttttctcagtattgacagcttcaatcagagggagacagtcagcattattacaaattgtccatcatctccaggcagagaaacctcacaggagagatggatactctagggtagcgtcactgctttcaaagaaagtcctaaacaccacaaaaacgcaaaacatctatagctttcaaagaaacgagaagcagcggccaataaggataaaaagtattgaacccatccggaagatgactagagaaagctgtacacaccatgcctctatttcatttgttttctccaccgactgctcgtcacatttaaatgtcactgtttgaagatgcactgaaaaatacataaacaaataacacctctgcagaggcagtggtttttaattaagtgttgattttatctcataacagtcactcagagcgcggcaggggaatatcctgtgggaaggtggagacaaggccactcctgcggccccagggctggttccagagctgagagaggcattttgggagattgaggctctaggactcgctctgtgcttgagaaacagggagctgctgcgtgcatttttggggccagacccttgcccctcccttccttgtctccctgtgcctgtgttcacacccggctgtcatgcttctcatccctgactgttggcacctactgtgtttaagtctttctcctgctgggcctcatccctgactgttggcacctactgtgtttaagtcttgccccctgcaagctgaacagacagtgctcgcggggtgagggtgacggtggggggtggcggtctccaggttgttagtcaacactcacgcgggccacgagcatttctgatctcttcacgtggattctcttttaatcttactaatgactagggtcaccaatttgccccaccttgtctgggactctcctggtgtgaggactgaaaatcctgcatcccaggaaaccctattgttctcacgctgctgataaagacatacccgagactgggtaatttataaagaaaaggaggttgaatagattcactgttccatgtggctggggaggcctcacaatcatggcggaaggccaaaggcatgtcttacatggcggcagacaagacagaagtgacaaccaagtgaaaggggaaaccccttataaaatcatcagatctcttgagacttcttcactaccaggagaacagtgtgggggaaactgcccccgtcattgaattatctcccacagggtccctcccacaacatgtgggaactatgggagctacaattcaagatgagatttgggttgggacacaggcaaaccatatgccccttagttgtgggcaaacaggggtggttgatcaccctggggttagcttcatggagagacaggtagaaattctaagcagaggaagtggcaagagtgagggcactcaagacaggaaatccacagggagtgtaggcagcagtgtgcagtcaggtggcacggggatgctaggaaacatgtgactgaaaaggagggtgggagactggcctgcaagctgcatggagggggttggcctgttctgtggcagggaagagaggctcaggtgaaaccaagtgttgaaggacacctgagggtacaggctcttaggacaaggaatactgcaaggaggtctctgctgccaaaagctgtgaattcaggaatgctgggggggtttcccaagaaaggaactactccagcagagtaaggcccatggcctctgggagacggtgctcttcgaggccattccagggggaaagagccagctgggtctggcagctcatcccaccacctgcagcctctagcccaggcaggggagtgagggtgcagcccctcccagtctgctggagccagggagctgccatcttgcttctttctgtttgagggcatttcaggagaggctggtggaggccagcgaagaatgcacgaaggcctcacttctggctgtaacgtctgccagagggcggcagcagcagcgtggctgttggaatcagccagaccaggttttcctgctccctctacccatgagtggtcaggcagccctgggccactttacatcatggagctttgggttctgcatctgtaacatggggatcaaaagactacttacttgcagggttatcatgagaagtaaatgaaagaattcaggaaaagtatttctcttagatcctgttggataatggtgatcatagtggcattattatagttattacaaatattactacaatcattactcattactattattagtattactattactgttatgaatttttactcactactatgattattactattgttactgtgattattgctcattactaagactattactatgattattgttcattaatatgattactgttactatgattattactattgttactatgattattgctcattgctgtgattattattgctattgttactatgattattgctctttgttgtgactattattactatgattattgctcattactatgatgatggtagtaatcatcatagtaacactgtgggattaatactatatttacataatatgtatatattatatataatacatatacataattatatattatacatatacataatataatatgtatatattatagtgtatatacatatatacatgtgtttacctatatacatatgtgtttatacgtatatataatgtatataatacataatatgtgtatatacgtaatactttagtaatgaataatcatagatcatttatgatcatttatcatagctgtggacagcagctactacatttataaccatgattactatgatcattattactcattactacaattattactatggctgtgatgattgttattcattcctatgatttttactctttactataatgattatgaaggtgatagccttgagtgttattagttgttactaccatgattactaacattgtagcctgaacacggggcattgctctcagggtgagttgtatgtgacaaccattcgttcatttcatcgtcttattctgtgttctcagtgatccttgagttattgccaacagatcatgaaaatgaatcacgggaggttaaaacagtgtctcccacactttttcatgacacctatagaaaaggactctgtgtttgtatcaccattgggcaacaggcaagcctctagtggtctggggtgacatgggccccactgagccatcccagggcctcacagtgttcacgtcttgacacatctgggatccattcatggccgtgctggaaacatgggactgggaaggcccaggctggaggaggcagccttctctggctgtgagtatgggaggttggccagtgccccatgggccaggtacctagttctggagcagagtccctggtgcccggctaatcaggcctgtctatttccctctaggtgttagaggagtccaaatgcctcgtgcggagcttcctgaaatcagtgctggaagacgtgaacgagaaggaatgcctcatgctcaagcagctctggagctcctccaaaggccttgactcccttttcagctacctgcaggacaaaatttatgaagtctgaggggccccagctcacgggcccccaacttccagctctgccctgtgtttcggaaaccagagcacagtgtctgccccggccaaggagtttgtcaaggtgtctctttatacgtagggttgtgtccatttcctcgtgtcctttggttgctcctccttggtttgattttgtgtaatggatggaaaacgcagcatacttggcctcccccacctccctgcccttcctggccagagagctgtccaaggctgtatcttcccagggctccgccaagcaccgctgtcctttccccacttgctgaaatgcaccatgacggtccaggaaggggaagaccactttcacattcttctgactcaggctgtgtctacacagtgcctctgacttggagacttggccatcatggctctctctggttgtatttagatcgggtgtcagaggacgaccaatcttagggaatttccagaccaatgagcaaaatgattgtgcacacctggcctcagtctcctttccgacgcaaatctgtgtgactattagggcttggtcttaaaacccaattgagtgatttgcaaacccagatattgtacatttagaaatgttttgttaaatatatatttttaaaacaatgtaagtggaaattctgataatttatgtgtattatatgtaaagctagttttgcaaaaacaaactactagggaaatgttttttctttccttggacttgttttatttatttatttttgtttatatattgtgatgtctgttgttcacacagatactattttcatactaccctggaccaaatcccacacaaggttcatgccgtttggtgcattctagcaatgaaccatgtagaaataaagtttagagagatgaaaacagaaggatttctgtggacaaaaggaatagcgctgcacctctgtgtaaaacggttctcagctgtaataatagaatactagttccttaggtttgtccttaggagacatcttgggagagttttttcttccctctgctgtctttaaggagttaaagggccctcttagcctgaatgatcctgaaacagacccagtcccaaattgcgtgatgttgggcaggagtggggataggccctacctgagaatagcatactgtctagaataagacttctttctttggggcaaatgactgaacttggatcctgcagtctgttgcttccatgtgatcagtgatttctggtattggccagggggatggggaagagttcccactctgctgagctgtctggaggtctgaatcttttccctccagaagctgaaatgactcatctgttttctagtttttttatgtacatagggagcaatgaccaggaatgagatctccttgcccctgtgcccctgggctgcaaggggactccagcagctgtgttagaccatcagattcaagtccctggattaactacagagaaggagggattgggggttgtggttttgagtggtgaggagaaagttcaggaaaacctgaagttgagagcagacaaatggaagggatgtgttctgcgtgaggtttaaaccatgggtcaagcacccagaaaaagctagattctcagattctcaggatggagggatttttttccgtttctatcacagcccctgcgtattcctggaggcccttggccctccccttcttcccctttcctgttgggcaccagcctttcttggcccttctttgaagagagtggaataaggcagcaagaagtgggcacagcttatggaggtgaggcaggcttagaagagagagttctggtgacagttctctaactctctgtggtcctttatcttttcctggcaatcaggtgcactgggcagggcaggtggaatgtattcgtggccctgagctttgagtttcaaagaacacgttgatagtctacaccagatctagagacatggtcctttaagcagtgaccctcaagttaatctggactgctggtccttctgatgaccttggttccctccctggaaagcgtgtctcctttaagagttcatgagggtcaggaaggaggggaaacctctccttcagccagaggaggatggaattaaagtcctgtgcaccctcccctttgtccatgtaggatcctgtaaggacttcggacctgtcctacagggagttactatagggagacacctgcttttgcccaaatgcctgttgtcacagctctatctggatcttatctcctcctttgagaaagcaaatgtgagctttccaaaacccttagatgaccctggttcttacatattgtggcagacagtgtcttcactactgctaaattttcattagaaagagccccctcttttctgttgaacttctgattgggcgcagttatattcagcatcggttgaagtggggtcaggattctccttggacatggaaggggatgtttagaaattcctttagatcagtgtccaccttcattccctgcttgaaagaactagaaatgcttcagctttggatgtactatcaaatccaaacttctaaacatttcaaggatctctgaagattaaggtaggaatgtgaaaccatttctaaggtggaaatcttgctgttaagtcacaggtcctgggtgtaacgggggtggtgaaagtctgtattttggttgtttccatacagtcagttccaccaattgggtgaaagcaggtgaaatctttttgctgcagggtggactgaatttttcactttctgggtagttgttttgatcatgtgtaggcgaattccaggtaacttacagcaaatagatttgggatggaaaataccagacctctggttgtgtcagggtttatcctaatagctttcctgagacagagctcagactttcatttttgatcttccaccccagggccccctctctgtctatgggatcctttctcccctctctctaccattttcccgtaccttcccccataagtcactcccaagagcctgggcaggtctttgaggaattgcggctcattttggcagccccgtcctgcaattacctttgggtttgaaagaatagctgtgggtgggcaattgaggacacctctttagtcagggacctttctagcaatccactccctcccatcctgttagccatgcagtggaactctccttccctctctgccccaaccccggtgatggctcactctcagcatcttatgggaccatctgagttaacaaccctgttccaagaagactttgtgcagaacttttgttagggtggtcataccttctcaccaccatttggaagacacagcctaatgctgatgtacttaatgtgccccttccggcatagaaataatgtctgggtaacagccatcaaaatcactaagaatgacattggatagctatgagaaagtagtagagaattgatttaaaatatcattcttgtttggtatagattaaactaggaaatgttctctctgaagcatgaaaatgtttttcccatgtgaagtttagtacaaggatggaaaaataataatcacagtagactttgaacaatgcaactgtatctctgaatatccacatttaaaaatagccttcactgaatgctgaattgcatttcccattaatttttggttttaaaaattttgtaaactttttttttatttggaatttagtcacatccattaaattttccaatctagtttctgtggaaattttttaacagagagaaacaaatagaaacatcttcaaatcttcctaagtgaatatttaaaatgcagaattgcttatcttctgtttttctgtattcagacacttatatctgttgtatatattagtttagacactctcactaatatacacagtatttaagactctaaatgagatttcttaagtattttattttattctctgtaaatggttttgtataatctttaaacatctacactttgcctttgtagatatttaagggaaaccatttggggttgtcttgcatgtatatttttgttgtagataagtgttgcttagttatttctgcaaattttggttgaaatgcttacagactttaatacagtatatattttcaaaatataaacttttatatttctgtgataagttaggatatgcgttttaggcaatatttttcattaatatcacttgttcttttgaaaaatagcatactggtttggtgccaattttttcattagaatataatgctcttatattgttggagagcaggttaatcttttttcgaagtaattgcgtttgaagtataatttcaaaatgtattgaatttgtgaataagccttaccattaggatcagtaaatttttcaactttgcaactacataagtagtttaagatctccccgtaaattctcactgtgtggcagttgatggagtttgtgaacagagccttaagcttgttgcaaaaaaatttaaaaagggtaatacgggttgtttcctccatgcaacgtaagccatgctgatggactgaatgcagtctgtaattcatggctaatccgaagagtttgattgagttgatggcggcagggaccagatagacaccttggtgattgtctttggccataagaatagaccaaggataggttttccagagacaccttcatactgtaaacatggtttagacacggtcatagggaaggctgctggtccatcatttgttctgaacaaatggcatttcctgctcctgaccctggcagttggccccagattccttgtcgatgacttggaaacgtccattctgggtaaggtcagcactccctgagagatgttaacaaagtttacctatgagtcttactgtgtagacaatctgaagtcaattttagttacacaatcagcattcccatgtgtcctcagtgtcttatcaatgaactatgtgtatcaagccatactaaactggagtttagcaggacaaaggcaaactaaatgtagaacataacatatcagctgaatatgtctatccaggactgtttttctagaacataaatcatggagctccttgacagtgtatccactgtttttggggtttaataaaaccaactagaatttagacttaaaaagaaattattattccttttggttgtccacataaagtagtccagggctatcatatggctaaaatcaagttatttggttcatctctggtatgtatttataaagtcaacttatcagccattaagatggagatttgctttaaatttttgcagtgtgtgtggcagtcagaaaaacccatatctagttttcaacttcacctctggtgtttttatggcttaaccttatatcattgatccaacatctagcctgatgctggagctcttatttctagcctgatgctggagctcttatatctagcctgatgctggagctcttgaagctgactcttggaagtttggagggtgtagagtttcccatctagtatttaatttgtccctgtgccattagtcccagcttgaagtcatttgccagtgtcgatgttgacaggattgtgacaatattgcctttcataaaaccgagaaccaaagaattccattattctaacaaagcctgagtttcatagattgtgggcacatctagacagatatgtgcatgcttgatggtgcagagaaactgctgacttccaccaacctcatgctccccctggctggccatacagagggattcgttgtcatattgaaaaggctctgaaagatgagtttctaattgaagctcactatctcaggttggtgtttctactgtgtagtcccaagcctgtatccatatcataaaagtggaggcctggtactcctccaggttatctggccagtgtagactcctccatctgaatatgaacctccagggtaagaatttttcagacatgtctatactgaacagtaggatcctgcactttccaaatgtctgcctccttttgttcttcattgacccattctaattcctgttaggtgtgagaagaattgtcttcagttctctctccattctcattcatgatggaatcattgatccattgaccagttgagaaatgattgatgctgaagaagtggtattctattggtaaggcttattaccaaacttccgataatgaagcaggctaccaaaaacttatccagcccaccctaggagtgtttggatttgatcatggatgtagcatacaccaaaatccaccgagacctttgcaaaattaggctacttgttttattttgccagattatcatgggagagtctttaactagttctgaatatttgtaagtctgagtacttcatagaattataaagaaggtacagctgaccccttctcaccatgttgtaaatatttactgagactgggtgcagtactgagggataataatcttctgatttatcaaatcctgactgtctagagcaaattgtacactctctttgtgaatggtcctgtaacgtgtatgaacacatttctgggtgccttagaagttgtatttttcatgtgtgctaatatgcagtatttatacattgtgagaagctgctttgaataaaaaggttgaaacttcgtctgcatttgcttgtgttccccgttttgcaggctgcacataaagttcatgagtagattctgtggtttctgagcagagaagtttttgggggccttctagcggttgagacatctgatatttctaggttgtgcctgtgtttctagggagcagaggcatctgaatttggtgcctctgctccctagaaactacccagatttggccaggaggcttcagttattcaggaagacagtcactaggtgggagcaacagcttgatgccagaggatcccagaactggggggcacaggagtgattttttggggggttgatatcagcatttatcccttccctgatatttccagaatgtttccttgtaccaggggctccctcctcaactaaagatgaacctctctggagctcgagcttggacaatcccagctgccacacctttgtcactatggacttacacaaagttctttcacatacatgctctcattgctttgatcatcacaatatggctcttaggagtggcaccctggtgaggacccttggtttctagggcctggcctcagaaacattgtgagggctgccgaaaagaatgataggaagtctttcagggatttgtggtaataggggattcttggaaaaggatttacacaagttcatctacccttcctcccatccatcctatcagtctgtcagtccagcatccaaccattcattgatccatccatccacccatccattaatccatctgtcctgtttgtccatcatccaaccatccatgcatctgccattcttccatccatcctatccatctatctgtccatcatccatccatctatccaccatccttctgttcatctctccacccattcttctattcatcctgtttattcacctgcctttccatccaaccatctgcccatctgccatccttccatccacccatcctatccatgtctatcatccaaccatccatccgtcattcttctgttcattcgtttgtccacccattcattcatccatccatccattcatccatccatcctatctattcatctggctgtctgttatccaaccatccatcctatctgttcatctgtctatcatccaaccatctgtctgccatccttttattcattttacaacccatatccatccgtccatctacccatccatccatccacccatccattcatccatctatcctgtccatttgtccatcatccaaccgttcatgtgtctgccattcttccatctatccatccatccatttctatctatccatctatccgttattcatccatcatccttctgttcctccatctgtccacccattcttccatccatcctgtcgattcacctatcatccaaccatctgtccatcggccatccttccatccatccatcctatccatccatctgtcaatcatccaaccatccattcatctgtaattcttttattcatctatttatccacccatttatccatcctatctgttcatctgtctgtccataatccaaatattcacctgtcattctgtcattcttccatctatcctatctatttgtccatctgcccatcgtccatccatcatccttttatccatccatccatccatccatatatcatccttccattcatccatacattatccttccatccgtcatccatccatccatctatctgtttgttcatccattcttccatccattcagtaatggctaatgggccccctgctctgtctcaggagctgcacaggtgctggggaatcatgagattactcagacagccccagtcatacaggagcttggagtctagtaatgtgagaagggtgggtaatctgccatgattcttgacatgtctacagtacagtgctggagagaacatcttacacaattatgaacacttagagtctagaagacggtgccacgttaatttttcatattctccatacttttcggtctgtggggaagccataattggatggagctcaggattttacctctgctggcctccctttcctttttgctttctgttgttcttggtgttatcattgttgttttgtgtgactgttttccccttctctaaagacctgattccatcttaagtagtgaaggtcaaagctgtggggtcctttgctcctagattcttatggcccctccaatagattggatgaggtctttttgatgtttcagagtataatatctataagacaaaccctccttatttcaattatctctcacttgctagctttgatgtgacattatgctgaaagaacccctcccccaataggggagataaaagttaagaacaaagagagtgaagtgggctgagaccccacatccatcagatatatcagtaattaaatgatcaagcagtatattgaataagcagtaatggagtgcaatcacaaaagcaacttgatttgcctctcactgtccctttaagtctgtttaatgggagtagtccttccctaaccctgaatgaaatcttgatgggtttcaggacctttctctcattcatacgtaagagttactagtcacaaacacagtctcaattcaataatcaaaaatgactattttccacataagaatcattgctcccaacttcatttaaagtgtctaatccttgctgccttttctgcactgggaaaagcaggaaagatcttctgtgactggtgctgttgacaggtggggcttttcactctctgagcctcataggtgtttatacctgactctctcacatagtgaaattgtatgaggttttagtgacctccctcagttgatggtgggcagtcctctataattgccagatgaaccctatgtcatcagctattccttcagctcctaggagtctggttgtccactgtcagcttttccagttcatctctgttgacccctttagggcaagacagtccccaggccagttctttgccatgccacaccacatgtggttcatgggaaacactcatgcatcctctgtccaaactgatgcaagggatttctcaggcatgagtcagacaccaatctactatgtcctccaagttttgggaggtatatgtaaggccccattcttcaacctgagatgaagggggagacctctttccttgctttatgggtgtgtgtgtgtaatagtgggtagcatagttctctgtaatggagtcctcttaacaaacccttcttaataaatgtgagatacacaaattacatctaaaaattatgcaggcattagaaagtggtgatttcaatgtggtggcattctccatatgagagacacgctgtagggctttgtaggctgtgacaatgacttgagctttctctccaactgagatggcagaccctggagggtgcagagaggagtgcctgggctgacttgtgctttaacaaatttcctccatgtaaatagacaaaagccagtgatggcaggagcaaggtcaataacatgagactcttgggattgtccatctgcacctcgacagaggcttgaatttaatcagaggtggggtggttgaggtggtgaaaaggagcaaaaccctgagtcttttgaaggcaaagatttgcaggtggatgggctgtggagtcagacagagagaggggtcaagggtgagcctgggactttgagtccgagcagctgcaaaactagaattgctcataactgaggcagtagtggctctaggatttgtgggagcaggtctaagtgtgatttccaggagcccagctgagacctggtgatatgatttgactctgtgtccccacccaaatccatgtcgaattgtaattcccaatgttgggggagggacctggtaggaagtgattggagtgtgggggcggtttttcctatgctgttctcgtgatagtgagttctcatgagatctgatggtttaaaagtgtgtgtcacaaccccagttgctctctctctctcctgccgccatgtgaagaaggtgcttgcttccctttcaccttccaccatgatagtaaatttcctgaggcttctcagccatgcttcctgttaagcctgctgaactgtggctcaattaaacctcttttcttcatgaattacccagtgtcaggtagttctttatggcagtgtgagggcggactaatatacctgattatcacaagtgccaggtgtctggttttgctcagcc

SEQ ID NO: 1080 - DNA, 3533 bp, Homo sapiens
atgccccacttcttgttggccatctgctttgtccagaaagttgtcttcctgtgtgccttctacagctgggctaaagcttctagaacattcctgaaagcagatgggctccctagaaggaagcagtgggttcttgtagaggccttggcaggtggaggagttcttggggtcagtgaggcttgtcatccaagctcaggcaaggccaggtgtggtctggaatcagaggtcaagagggcaggaccctgcagtaggggtcctggtaaccagcaggacttaggggagcctgtacccaggaatagccgtggagaagcccctgaccaccagcttttcgagtatgttgtctatgtcgctgaacaaattacaattcaggttctgtttgaggtgctcctgagaagaggaaaagagtcagaaacctacacaaagatgtatagaagattaggtcctgagagatgccggagatcaaagtatgctggggttgaaaggattgtagacaagaggaagaacaagaaaggaaaatgggagtatcttatccgatggaaaggctacgggagcaccgaggacacgtgggagccggagcaccacctcttgcactgtgaggagtttattgatgaattcaatgggttgcacatgtccaaggacaagaggatcaagtcagggaagcagtccagtacctccaagctgctgcgtgacagtcgaggcccgtcggttgagaaactgtcccacagaccttcagatcctggaaagagcaaggggacctcccataaacggaagcgaattaaccctcccctggccaagccaaaaaaagggtattcaggcaagccctcttcaggaggtgacagggccaccaagacggtgtcttacaggactacccccagtggtttgcaaataatgcccctgaaaaagtctcagaacgggatggaaaatggggacgccggctctgagaaggatgagaggcactttggaaatgggtcccatcagcctggcttggatttgaatgatcatgttggagagcaagatatgggtgaatgtgacgtgaatcacgctacactggcggagaacgggctcgacacctgtgtgtctacctggtggcatttgtctctttggctgccagagacccgagccttggaatgtccagaaatcttacaggagtgtggacaaccattgcccaacagggcagggccatcagattccctgatgaaaccaggaatcaccactgcttctctgggtgaggagcttgtcccagaagaggcccagggaaactggttcaggaaggctctgactgtcatcggcagtggccccacactatctggtgaaccactgagaggtagcatagaggcgaagaaactgataagagcaggcaggacagtgggggcacagaacaggcgagcaagttgtccagccctgcagcccgtgagggggatgtgggatctgaatgcaggcagtgcccccgactggacgtcaccctggcttttgggctcagcagagcacgtcttccctgccagcttgttgctgtcactcgggaagcatgatgctcctgaaggagagggacctcgaggactgctcggatcgtggtccatttcagtttcttacattgtttatctggttttggaaggctctgctctgaccaacgggggattgaacctgcacagtccagtgaagaggaagctggaagcggagaaggactacgtctttgacaaaaggctcagatacagtgtccgccagaatgaaagcaactgtcggtttcgagacatcgttgtgcggaaggaagaagggttcacgcacatcctgctgtccagtcagacctcggataacaatgccctgacacctgaggggaggctccctgcacaggcagaagcagattccctggcctctaccctcagggggtcaggcctctggctgtcttgcagtctgaaagccccaggcttacaggatagacacttaacatccctgcaaattcatctctgccggcagatcatgaaagaagtccggcgagcgctctgcaacgcagccacagacgacagcaaactgctgctcctcagcgcagtggggagcgtgttctgcagcggcctggattattcctacctaattggccggttgtccagcgaccggcgaaaggagagcactcggattgcagaagccatcagccccgccatcgcagaaggatcagatatcggagctgcagggcccgtaatgcaatatcctgtttgctgcttggctcccagtgatagagatctactgcccgaggttggaaaacacagaatgaaaggctctggggtcctgcagaggaaagctctggaaagtcacaagggctgcagtccattcctgaaggatgtcatgtggttgatggagctgagggactttgtgaaggcctttatccagtttaagaagcctatcgtggtggccatcaatgggccggccctgggcctgggtgcctccatcctgcccctctgtgacatcgtgtgggccagtgagaaggcctggttccagacgccctacgccaccatccgcctcacgcctgctggctgctcctcctacaccttcccccagatcctgggcgtcgcgctgctctctgtcttggaaggaggtcccaccttgttcagagaggacccctttgagcaggccaatgagatgctgttctgtgggcggaagctcaccgcccaggaggcctgcagcagggggctggtgtcgcaggtcttctggcccaccacgttcagccaggaggtcatgctgcgggtcaaggagatggcatcctgcagtgccgtggtgttagaggagtccaaatgcctcgtgcggagcttcctgaaatcagtgctggaagacgtgaacgagaaggaatgcctcatgctcaagcagctctggagctcctccaaaggccttgactcccttttcagctacctgcaggacaaaatttatgaagtctgaggggccccagctcacgggcccccaacttccagctctgccctgtgtttcggaaaccagagcacagtgtctgccccggccaaggagtttgtcaaggtgtctctttatacgtagggttgtgtccatttcctcgtgtcctttggttgctcctccttggtttgattttgtgtaatggatggaaaacgcagcatacttggcctcccccacctccctgcccttcctggccagagagctgtccaaggctgtatcttcccagggctccgccaagcaccgctgtcctttccccacttgctgaaatgcaccatgacggtccaggaaggggaagaccactttcacattcttctgactcaggctgtgtctacacagtgcctctgacttggagacttggccatcatggctctctctggttgtatttagatcgggtgtcagaggacgaccaatcttagggaatttccagaccaatgagcaaaatgattgtgcacacctggcctcagtctcctttccgacgcaaatctgtgtgactattagggcttggtcttaaaacccaattgagtgatttgcaaacccagatattgtacatttagaaatgttttgttaaatatatatttttaaaacaa

SEQ ID NO: 1081 - protein, 966 aa, Homo sapiens
MPHFLLAICFVQKVVFLCAFYSWAKASRTFLKADGLPRRKQWVLVEAGGGVLGVSEACHPSSGKARCGLESEVKRAGPCSRGPGNQQDLGEPVPRNSRGEAPDHQLFEYVVYVAEQITIQVLFEVLLRRGKESETYTKMYRRLGPERCRRSKYAGVERIVDKRKNKKGKWEYLIRWKGYGSTEDTWEPEHHLLHCEEFIDEFNGLHMSKDKRIKSGKQSSTSKLLRDSRGPSVEKLSHRPSDPGKSKGTSHKRKRINPPLAKPKKGYSGKPSSGGDRATKTVSYRTTPSGLQIMPLKKSQNGMENGDAGSEKDERHFGNGSHQPGLDLNDHVGEQDMGECDVNHATLAENGLDTCVSTWWHLSLWLPETRALECPEILQECGQPLPNRAGPSDSLMKPGITTASLGEELVPEEAQGNWFRKALTVIGSGPTLSGEPLRGSIEAKKLIRAGRTVGAQNRRASCPALQPVRGMWDLNAGSAPDWTSPWLLGSAEHVFPASLLLSLGKHDAPEGEGPRGLLGSWSISVSYIVYLVLEGSALTNGQLHSPVKRKLEAEKDYVFDKRLRYSVRQNESNCRFRDIVVRKEEGFTHILLSSQTSDNNALTPEGRLPAQAEADSLASTLRGSGLWLSCSLKAPGLQDRHLTSLQIHLCRQIMKEVRRALCNAATDDSKLLLLSAVGSVFCSGLDYSYLIGRLSSDRRKESTRIAEAISPAIAEGSDIGAAGPVMQYPVCCLAPSDRDLLPEVGKHRMKGSGVLQRKALESHKGCSPFLKDVMWLMELRDFVKAFIQFKKPIVVAINGPALGLGASILPLCDIVWASEKAWFQTPYATIRLTPAGCSSYTFPQILGVLSVLEGGPTLFREDPFEQANEMLFCGRKLTAQEACSRGLVSQVFWPTTFSQEVMLRVKEMASCSAVVLEESKCLVRSFLKSVLEDVNEKECLMLKQLWSSSKGLDSLFSYLQDKIYEV

SEQ ID NO: 1082 - DNA, 2114 bp, Homo sapiens
caggttgaaaggattgtagacaagaggaagaacaagaaaggaaaatgggagtatcttatccgatggaaaggctacgggagcaccgaggacacgtgggagccggagcaccacctcttgcactgtgaggagtttattgatgaattcaatgggttgcacatgtccaaggacaagaggatcaagtcagggaagcagtccagtacctccaagctgctgcgtgacagtcgaggcccgtcggttgagaaactgtcccacagaccttcagatcctggaaagagcaaggggacctcccataaacggaagcgaattaaccctcccctggccaagccaaaaaaagggtattcaggcaagccctcttcaggaggtgacagggccaccaagacggtgtcttacaggactacccccagtggtttgcaaataatgcccctgaaaaagtctcagaacgggatggaaaatggggacgccggctctgagaaggatgagaggcactttggaaatgggtcccatcagcctggcttggatttgaatgatcatgttggagagcaagatatgggtgaatgtgacgtgaatcacgctacactggcggagaacgggctcggctctgctctgaccaacgggggattgaacctgcacagtccagtgaagaggaagctggaagcggagaaggactacgtctttgacaaaaggctcagatacagtgtccgccagaatgaaagcaactgtcggtttcgagacatcgttgtgcggaaggaagaagggttcacgcacatcctgctgtccagtcagacctcggataacaatgccctgacacctgagatcatgaaagaagtccggcgagcgctctgcaacgcagccacagacgacagcaaactgctgctcctcagcgcagtggggagcgtgttctgcagcggcctggattattcctacctaattggccggttgtccagcgaccggcgaaaggagagcactcggattgcagaagccatcagggactttgtgaaggcctttatccagtttaagaagcctatcgtggtggccatcaatgggccggccctgggcctgggtgcctccatcctgcccctctgtgacatcgtgtgggccagtgagaaggcctggttccagacgccctacgccaccatccgcctcacgcctgctggctgctcctcctacaccttcccccagatcctgggcgtcgcgctggccaatgagatgctgttctgtgggcggaagctcaccgcccaggaggcctgcagcagggggctggtgtcgcaggtcttctggcccaccacgttcagccaggaggtcatgctgcgggtcaaggagatggcatcctgcagtgccgtggtgttagaggagtccaaatgcctcgtgcggagcttcctgaaatcagtgctggaagacgtgaacgagaaggaatgcctcatgctcaagcagctctggagctcctccaaaggccttgactcccttttcagctacctgcaggacaaaatttatgaagtctgaggggccccagctcacgggcccccaacttccagctctgccctgtgtttcggaaaccagagcacagtgtctgccccggccaaggagtttgtcaaggtgtctctttatacgtagggttgtgtccatttcctcgtgtcctttggttgctcctccttggtttgattttgtgtaatggatggaaaacgcagcatacttggcctcccccacctccctgcccttcctggccagagagctgtccaaggctgtatcttcccagggctccgccaagcaccgctgtcctttccccacttgctgaaatgcaccatgacggtccaggaaggggaagaccactttcacattcttctgactcaggctgtgtctacacagtgcctctgacttggagacttggccatcatggctctctctggttgtatttagatcgggtgtcagaggacgaccaatcttagggaatttccagaccaatgagcaaaatgattgtgcacacctggcctcagtctcctttccgacgcaaatctgtgtgactattagggcttggtcttaaaacccaattgagtgatttgcaaacccagatattgtacatttagaaatgttttgttaaatatatatttttaaaacaa

SEQ ID NO: 1083 - protein, 443 aa, Homo sapiens
MSKDKRIKSGKQSSTSKLLRDSRGPSVEKLSHRPSDPGKSKGTSHKRKRINPPLAKPKKGYSGKPSSGGDRATKTVSYRTTPSGLQIMPLKKSQNGMENGDAGSEKDERHFGNGSHQPGLDLNDHVGEQDMGECDVNHATLAENGLGSALTNGQLHSPVKRKLEAEKDYVFDKRLRYSVRQNESNCRFRDIVVRKEEGFTHILLSSQTSDNNALTPEIMKEVRRALCNAATDDSKLLLLSAVGSVFCSGLDYSYLIGRLSSDRRKESTRIAEAIRDFVKAFIQFKKPIVVAINGPALGLGASILPLCDIVWASEKAWFQTPYATIRLTPAGCSSYTFPQILGVANEMLFCGRKLTAQEACSRGLVSQVFWPTTFSQEVMLRVKEMASCSAVVLEESKCLVRSFLKSVLEDVNEKECLMLKQLWSSSKGLDSLFSYLQDKIYEV

SEQ ID NO: 1084 - DNA, 142837 bp, Mus musculus
  misc_feature (1)...(142837): n = A,T,C or G
ctctcctctagggggtgttggcatttgagtacgagaaatgttagtccagtttaaatgtttcaagggccaacagcaagtatttgaggttctgaagccagtttagaagaaagtataaagccataggccactttcacctgagtcagagagcagtcattttgttctactggaatcctctgtgaatggagataaaaattaaacaatactgaaaaaatctctgctatctttttggtgaagtgactttttaaaaacttatttatagaataaattttgtctatatatgtatcttctttttttgactccagtgtttatgcgatagcctttgttttcatttatatgtatatcaagcattatttataattattgttagcatttatttccattattaaagaatgatgctgtgctgatatttaaaaaaacagtgtttggaatctcttttttgttactcatgtatttgatggggaggaacagggttttctattagcatttgtgagtgtgtaggattgtatggcacatctgcaaatgagcaagaagactctatttagggattagcctcacagcctttttaatgtaatgttcctgtatagaaatatattgattaattttgttttaaaaccttcatttcctttgttggggcctgggaatcatggcacaaaccactcaaacaccaatctcagtcaaaaaaaaaaaaaaaaggatggtttattgaatgccacaccccaagactgattgatcagggccacaggtcaaacttcagagctggctgtgatattgagttaagatcctacagggcttttaagtctaaaatctacaaatgtttgtgccaagttattccaccaatcagggttcagggattgtcaatttccttagaaacatgtttttgttgtacacttatcctgtttccattggctgggacattcaacagtggcaggggactcaccttgtctaacattcatgtgccaactaggatatcagttacctatgtacatgtcatacatgtctctttctgccaagcatgatgtcagttcccagagaggtcttgggagcttaaacttttctctacccccactcaaaatagaagtcttattccaaatagcttcttatattcttatataagaatattataaggatattcttatataagaatattataaggatattcttatataagaatattataaggatattcttatataagaatattataaggatattcttatattccaaataacttctcttattttggggtccatcctaggggcagcttataaaagtaaaaatcataaatgcttatacataagtgaaggaagtgctgcctggcagttgatttgggtttaggtttatggtggctagctacacaaggcaattctaactgatttctattgtgattggtttctaagaacaccaaagcacagaacataacagaagatgtaatcaactcaggcatgagaaagtttcctagtaaaagcagtgagaacatatgagaaagtttccttgtaatattagaaacagcaaaaatgagagacaagacagataacagttacctagaccttaacaccttaatgtcaaagtcagatggagacatcacaaaagagcaaacaataaatcaataccacccaagaactgttaaagatccttaacagaatattaaaagccaatgtagcaatggatagaaagaattgtatatgataacccagtggggtttattctaggtatgcaagattgtttcaagataaagccaatgagtgtcctttgtgacattattaagccaatggaggaagaaaaaaaacccaccacaaaaccccaaagtaaaacaaacaaacaaacaacaacaaaaatctactacatgattacatcaatagtagagtaaagatatctcataaaaattcaacatacgttcatgatataaatttatcaaggtaggaacacagggcagcttccttaaattgtcaaagacatctacaaaaagcctacaggtaatatcatacttatttttgagaaaacaggagtttcctgataagaaacatggcagcaacgacatggtgctggtctcccgccaacgcaaaataataaggaaagaaaatgaagggtgtatagactgcgaagaaagaagataatttttgttcattaaaactatgattatttaggcagtaaatctaagataattgacacataatatgtaatgccgattataaacaattatatcaggatctccagataaaaggttaacatataaaactcactcatgttccttcatgtcagcaatacacacaggaaaactgaaatcgaaactataatttgtaggtatagatctaataaggcatttgtaatatccatattagacaacatttacaatgctgatagaagttaaaaggttctgggccatgaggttgttcagcaggttaaggcacttttattcaagcctcatacctgtgatttgggacccatatggtggaagaactgactcccacaaattgtcttctgacttccacgtgtgtgctatgacaagcacactccctcccacactaagaaaacaaacgtgtaataaataaacaacaaaaaggactccacaatcattgataggaagccttaacattgccaagttcttgcaaatttaccttgcagatgcaatacaattccaggcaaaatcctagcatgttatttttagaagctataaacaaacaaaataaaaaccaaaaactatcaccctaaaccaaaacacgacaataacaaaaacagattctaaggtgtttatatggagacaaaatacacaggaaccaacttaatactgaaggagaatcacaactttttcctgagattacctaaatttggaacttcgtaaaatgccagagtaataatgcagtgtagatggaatataggataactacttgcctacctcttgcttgcatgaggtggagggtccaattcttagcaccaacaaatgtattaataatagctcagagaaccaggcatagattcataggaatatagacaacagattctttttttgttttacactaggtcttgttatgtattttaagtcacaatcctcctgtctcactacaaaaatgcaaaacataccatagacatgaatatcaaacaagaaactctagaacctctataatataatacagaaggagaaatccaagggatttgggggttggtaatgaccttttaggcacaatctctgaaagaaacaaaagataaattggagttgttaaagataagaaaaaaaaaatctctccaaaaagtactaacaagagaatgagaagacaagacacagttggaaaaaaaaaaacctacttgcaaaagtcttgtctaatgaaagactattatgtaaaatatataaaaaatcttataacagcaaaagaaagtgtaaaacttgacttaaaaaattttaaggacctgggaagattgttcagctagtaaaatgcttgcttcactagccagagggtcttagtttcatccctggcacctactggaaaagcatgttgctgtgtgcttagaatggaggcaggggcaggcagactggacagcctaactgcatcctcaggtccagtgagagtcaatgttactaaagtagggtggacaccgaggttgacctgtggcttgcatgggtgtcagaattaaaaaaaaaaaaaaaaaaaaaaaaaacaggtcaaccaaagactagatacagtgtaatacaaaatgctccacgtcccatttcattggcaagctacaaattaaaaccacagtaagatgccactagacacttattagaacagctgaactccaagtcctcgtccccataaaacaacaggagctctcacttatagctggtggaaatatcaaacagtacaggcactttggaaagtagtttgtaagtgctcatgaagctggaggtgtccttaaagtgagatttagcaattccactgctttcaatattctttgtccgaggagtgtttggtcatcctaaaactgcctcatccttagctgtcaggagtggctttcagagcaagtcaagaggggtctatggatgacatgtcctggagcaggaagtaaagcatcatatatagtcactcatatagtctgtaaggaaactgggaatagtgaactaatggtgtccaaggtttatagaggagagaagatgcaggctttatattagaaataggaaggggtgctgcccactcatctactcttggcctctaagagatctgagttaaatgacctaagatgggtccccttgaaggatccacctgacacaaattccactattatctgtgctctctcccaacatttcatctctggcagccccaagcagctgagtttcagtgtgccatgcttctcacatcaattccttcttgacaggtgctaaaacaagaacaggaacatgagcaagagcaagaagaagaggaggatgaggaagagaaggaggaagaggaggaggaggggaggaagagcaagaggaagaagaagaagaacaactactactacaacaacaactacaaaactacaactacaactacaaaactacaaaactacaaaactacaaaactacaaaactacaaaactacaaaactacaaaactacaaaactacaaaactacaaaactacaactacaactacaactacaactacaactacaactacaactacaactacaactacaactacaacaatggaacacagaaaaccagagcctcctttgggatagcattgaaaatgtaaacgaggaaaatacctaatcaaaaaaaaaaaaaaaaaaaagaacattgcctagaaaaaaaaaaaaaacaaacaaaactcaggaaagatgggggctccctggaatcctactgttcagtatagaaatcgacactcagtggtctttggagtgccagtaatcaaaccttcttaagtttctttgttggctttatatccttttaagaaataaatcataactttttctctttctgaaaaaaaaaaaaaaaaaaaaaaaagaaaaccagagcctgagtcaaagctcagggcagaaggtaagtagaacatttagaacagggcagaaggcacttaggacatctgctagtccttcattgagtgtagacacaaagatgacccatcatgccccccccaccaggcataatggcctcttcacaaccacacaataacgccagtggtggaaacacagttggtcccatttcctacagatggatcttccctgcattctgggcagctgggctcaggtgaaggatcagagcatatggcactcatagtgactccagcctcttcctctggccacagccaggactacaggggactactaagaggtgcttcaccattccctgagaagagttggtcaggtatgaaggaggcatgaagatggacgtacatcagggatgggaagtcttgggttttgagcagtgaggccacagggaaccaaaacgccaggaagaaagccaaccaggcaccttacaatctcctgaaagcagaaagagctgaacaaacctgagcctgagatggcacaaacagcaggtgagagaaaggtgctcacagcgggggtggagagagcagggacccatgcagcagcacagacctgactcacctggtcgagaccgccacgcccagtggaggtgggaagtgtgcagctggccagggctcagctccgccacctctggatgagaggacacctagctcctccattgccctcacaagtactgtctccagatacacgttcaggagctgcctagggtgagggagaggctgtctggcctgggaccttcagaggctgcaatgctttctgtctctcccactccctcaaagcttctctgtattgtgttctatgtctgtgtcctgtagaaagttcagaacacacagggtgaacagatccatggttcttgtctcagagctgacacgttattcctacaggtacagctgtcactgaaccatcctgggccacttctcatggggacgtccctcagctcttgaaaatcatctgtggccaaactgaaaagcaaacaaatgcatccctaaaggaaaccagtacttggagggaaaggggagagatgtcagtgtgtgtgtgtgtgtgtgtgtgtgtgtgtgtgtgtgtgtgagagagagagagagagagtgagagaaagagagagagagagagagagagagagacagacagacagaccagggctgcacagcgaggtgttcccttgtctctttttgctgggaaacaagcccagggccacagactgtgtgacaaggggccactgtgatgtgcactgacttctgatctctgttccctctcataacctatgggtgcctggacactggcaggtagcctctctgctcttggctctctgctggactcctccaatgggcacacctgctgcagctggatggggtgaaggttccagaggtctcacttgtagagctgggttgggggtgagtgggctgggctgctctcattctcctccatgtggcctgtccttgaactaggtgcctccagtgcagctgcagagttccactggtgtggagtgaggacccggggagagtggctgaccaggagaacaggcacagtctcctcaggttgggctgtggcagaggactgatgctcagagatgtgagggcctttgctggtagttggagttcactctgaatgtctgcatgcagattccagcaccaggtgtgaaggtcacagaagtgtcttttgacattgtcctggtgtctctcagtggccattctctgctaccccatagcatgacttgcagtggggcaagcctgatacagaatgttccagagccctgaagatgtctggactttcactagtttcaaacacagggagcattgtaatacaagggacagatctgctgtggaggtcacacaaataggaattgttgctcttaggaacaacatctctcttgaccattgcagaagtttggtgccaggtgcctgtcagtagcctgcttgaacgttattgatctgggaagtggggtgtgcttttgctgtgagggaactgagagtttgtgggttgaggcataatttcctaactacctttccatgtcatggtaactgtcacttcccagagatgtcccttagagcaatgatttgatagccacgtccattttctttcctcctgttttaacctgtagaataattcttcctaatttcttgtctgtatctctgatgtccaaggactctgaggatggaagcaatcagaatttggctcattaaggactacgagtgcctgtaccatgctattgaacctggagatgggcaaatgctttgctctctaacttccaccactttgttcctggtccctcttttatctttgaaactgctgagtaaaggtgaagggccactgacctgatcctctctgactaggccttaaatgagagctgtgttttaagggggtaaaacacatgtggcatttggctggaaccatacaactgctgacatctccgtgtaactctgtggtcagctagaatcctaatatccttggagaattgagaaaattcattcagactttcgttcctcatataataagcccttcaccaacttctccatgtctgtggtgattctggattgtccagtatgttgctaggctatctatctcacagtctggctttcaattcatttctgagcagtgcatacttctcttcttgtagctgttgacttaacttctcctcctttgtcacccttctcaactatcagccttcagtcaattctggctcactctgccctaccccaatttcatctcttttttttaagttaaaacaaggcatttcttttggaatattttttgatgatttgccgagcttattgaagtataatttaagtacactgaactgtatatttaaaacacaccatttgcttgcttttgacatactcagccagtacatgtcaagtatcacttcaaccacccaccatgaagatactttgtgctctttttaatctgtccttccctcccttcctccagtcccacacaaccactgctacattgtcggcacatggacagtttctattttttagcttgtctgtgaatcacacagcatgttctttctcctttcgccagtcttctttcatgcaacgaaccgcttttcatttctcctttctgctgttgcttttgttaagtagtttgccgttatcgctccacaatatcccatgagttttctttttattctttttgcactacgtgttcttcactgctgtaataaaatgcctggagcttgtgaggaagaggcttatttggcacatagattggagacatcagggcacagtgttggcatgctgtcctctttggcaagacctcatggaaagaggcatcccagtagcaggaggaggaggagtaatcaggagactgggagcaccagatttttttttttttggtaccaagtctctcccatgactgactcagggtcttcacacatcctcttactctcttcaacaggtggcacctctgtggcctcccatgaagcatcacctaaaatgcaaaattccaccatctcccaacaccatcaccttcctgagggccaagttctaacattggaaccactgggggacaaattcacaccaaactcagacggatgctcttgaggttgcgaatctttgactacaacaaacctacagacacccacggagaggattttggactctgagctttcttggctcttcagtaagtacctgtaactgcaatggcagagttgtgtagcaagcatactttttaactttcaaggaactgccaagctagtctgcaaagtggtggtatcagcctctggtcctacaagcgatatgcggaagtttcatttgtcggtcgcctcaccagcttcatcattagtcattggaaacgtctattttcagatgtgtgcactagatcagtgtacttctgtttatttacctgttgctgtcgttttatctctaccttcctttttagccccctgtaggcacttgtctcaagtgagattggcatgactggaaattaagttgagctgaagatagagcagaagttggctgctgatgtggagggagtcaggtcaacctgtgtcatccttagtaaggatgcaggcctgttccaagtaaggtggattccataactatttcccgggcaaccccccccccccctttgtttaagcatctgactggggtgtctttctctccttatagtgaggttccttacatccctagcatttcatcaagtctgggttcccactcatttcacatctgaatgctttttgttggcattcaaatcagaagccttggccagatggttgggttcagatctgttccttcagaggtcactgacaactctgggtcaaagtatctaacatttcaccatgtcactgctaccctgcagggtttgtttagccaaatactcttgcttcaggtatccattgtaatgaaccaggcaggctctttaatctttaactaaattatcatcatttcaagatgtgatccaaaaactgttttgtaaagctgcctgcactccccggtaccatttccttccgtttttagtgattagatttaatacttaacagaaacgtgcccttattttctcagagacctaaatttgcaaagggcagcagatgtacatcacaggaggcaagtccttttccagtgacacatggttcccagatattagtggataaagggggtctctgagtagagaaaaggcctaaaagtagcgagagaattgagctagatccaattttattctctgcctgagaatttcaggagccttgattatgcagtacaagcctacctcacaaggaagactccagcttgcctcaggtggccctaaacagcttcacctaacataactagagcttggtaggcgctcagataccagaaaaacagactggctagctgtgagccattccttctgcccgcccagtgcccaagccccgccctcggctcctccccaccaggcccaccaatgatcccgcccctggcgctcgcgtcccgcccctacgtgccgcggggaggcgggaggaggagttggcgcggaggaggcgtggctgtgcgggcgaaggcgcgggcgggcggcgggacctgacttcagctgtgacacccacggcgagcggccgtggtggcgcgcggcgcgaggttcaggacgcgctccgccgcctctcgcacccgagttaggcgccgggctttgcctggattcaagcagctacgacgcggctagtcctggtgcagcatcgggggccgaatttcgccgcggctactgtcgctcaggagcaattctgcctgctccgggaaagcggcactgagagtttccctgggagaaagaaccgggacgcgcgcgtagagccacaggggaccgggaaccgatccgaccgagcggcggagaggtgggacgcggggatcggagggccgggggtgggtccctgaacccttgctcagtgtctgcgccggcacgctcagcatagttaccaagttacagtgctatgagcgctgtaggggcttcgtcttgtctgtctgcaggagccccgttgtggggggtgttcgaagtgaagcggctccagcgttgaggctagtggagatagctctgttccttttttagatccagtgtgataaataacccgaggaaaccccacacaggtcagcctttctgtgtctacgttttcagaagttgacctgacgccccccccccccccaagttatgaacttccaacactgcgggagtgcaaagggttgattgattaatttcaataaatttctatgtcaatttctaggtggcccagcaaaaggtaattttggacactagccatggaagatttgatgtttgtctgcagcaacttcctcgacccttaagtcctgtaacctcccgttcttttgtgcctatcaaggctcccgggtttcttctctatccagagttattctgttgtggttggccatggggagcacactgggctgccatcgctctatccccagagatccctcggacctgtcacataaccgcaagttcagcgctgcctgcaacttcagcaacatcctggtgaatcaggagcggctaaatatcaacactgccactgaggaggaactgatgactctgcctggggtgacacgtgcagtggcccgaagcatcgtggaataccgagaatatatcggcggcttcaaaaaggtggaagatctggcacttgtcagtggtgtaggggccaccaaactggaacaggtcaagtttgagatctgtgtgagcagcaagggtaactctgcacagcactctcccagttccctgaggcgggatcttctggctgagcagcagcctcatcacctgaccaccactgtgcccctcactcctcgagtcaatatcaacacagccacccttgctcagctcatgagtgtccggggcctcagcgagaagatggccctcagcatcgtggactaccgcagggaacacggtccttttcgaagtgttgaggacttggtgagaatggatggaatcaatgcagccttcctggacagaataagacaccaggtgttcgcagagaggtccaggcccccatcaacccacaccaatgggggtcttaccttcactgccaagcctcatcccagtcccacatctctgagcctgcagagtgaggacttggacctgccaccaggggggcccacgcagattatctccatgaggccctcggtggaggcctttggaggtatgagggatgggcgacctgtgtttaggttggccacgtggaacttacagggctgctctgtggagaaggccaataacccgggggttcgagaggtggtgtgcatgacgcttctggaaaacaggtgagtgtagcaagcgcagagggggttgggagtgaatgcagcactgagtggcctcagctgaggatacacatgagtggatcctttgggacaagaaagaggaaagagtgcttaatccgtgttcctgaggttccagagctgattgccgaaagctggtcccctccttagcagaggctatgtagtgttggttctgctttggagaaggtctttggcttatagggtttcacagagtttgaactgactggcgactcagtgtgggaactgagacggtcttgcatgtaagaaaaaactgggttttttttttttttttgtttgtttgtttttttcttcttccaagacagggtttctctgtgtaggactggctgtcctgttactagctctgtagaccaggctggccttgtatttagggatccacctgcctctgcttcctgagtgctgagattgaaggcctgtactaccaccaccctgataaacacctgagttttgaaagattacattaatgggagggaaagtcatgttttcccatcaaatacacctatttgcatggagaaaacccatactatttgcaaacatatgcactgtacttgccagggagctgtgaacaaagcacatagcactccttttccttgttgaacctgaacttggcttttagcatgctcctcctcctgacccatagctggaaaaggccagtttgggtgtggatactgggcagatggttccttctgaactaaaggagaaaagcctggcaggtccagccagtgggagaggatgtttctaatcatcacagaattactgtctgtaggaactaactccccacacagcagagcgatacatcgtggcaagaactcctgctatttgtaacatagtgtacagcgtaaagtcattagctccttactgtgtcagaaattctcagatgctgatctgcagggatctgggacacaatcagtaccggtggttcctcactgccctcctttgaggaggctgatctccttggcagggtggtgtcttggtgtctggaagtgagacgtgagctctcagtgcggatccagtgaattgtagcaggtcattaggacagattagtgaggagaaaagcaggtctcaacatctccttggcactgtcccatggcacattcttatctctgaggagagaggggcctgcaggacggacggatcagagaccaggaaatcactgagcgctctactctttgctatgttgtgctgtctgtctgtctgtctgtctgtcaccccaactcagtcattctgcaaactcatcttgtttacagtcctgggagactcacatcagacctggcttgatgacagtgctccttcacagctgctgggacagcggccagcagcatggttgcctgattcccagcaggggctttcttaaggcccagtgtagtaatgagaggggcaaatctagatctgaagtctctcagtatggacggcagcatgggcaatccttgtccatttatttcatcagcatggctctggactagtaccatcagccattgcctaacaagccctgggtgccagcccagttttcccatcactccagctgtttctggtgtgctctatagctgagaagcaccggtgctctgtgttggaccatctctgtacttctgagtttctttttaaagaccctcccccctgttttggcattcctggtgtgactttgtgttgagcttttctgttactgagttccctttttggattgttctggtcatctctgaatttatttgttcccataacattcagtctgaccaggaattaaggaccttattgctttctaggacatatgaatgaagagagggaaagatgggaggatgagactggatatggggcgggttgtcccagctgatcagaagctatttaggcagctggcctggctctgaatcaaggatggggccagcaggggctgtgtggagaggagcagtaacaattcttgttcagtatggggtccttggggttttgtcctgttttgttctttggatcttggaggaatattgtaggtgtgtagctgctgacatcaggcagattcaccctaacccaatgacgtgtagaaggggacacttgtagtaagcagtgggaaggtggcttctacccccactggctggtcacactaggctacatctatgtcctatgagttggtgactcctttggcctgatcacaattcagtcactattctgaggaatcctagcacgtggttcatgtctggtaaaacctaagtaataggcttaaggcctgatccgtgcaaagctggggtgggaacgtttgcctgtgtggttgtcctagggcaccagaagctgtcacacagtccttgagggcaggtggcagtggccgtgctccaagagctgtgtattcatactgattcacagaagtttctcaacacctcaggagttccctttgttaataacaggaagcatattcagtgtgagcaagtgtggatgcacgcggctttcccggtggcccttattttcatactgtaggtgtacagtggcagagtgatggagtttagggtgtgtgtgcctgagggttttctgatggcttccacagccttctgttcaccccagtaactctaaaggaggggatgtttgcttttgttagagattctccatctttaggtgaggaaacaaacaaggagttaaagcacttgcctctgaaacagctcatttgtgattcacgggacgaggacggagaccaactggctttattatactgtgacccttgcaagcattctgtttgcttaggcatagcacctatatactacttcttggttaggtgtcctgtgctgtaccaaaccaaaggtacttgccaacttccatgcctgtctcagacattaaatccattattaagccattctaaagcaaaccctgggcagttttgtggagggactggctgtcacgtagcctcttttctgtgaggtttgctcatcaactatgtgcgtttttcttagaggaaaggtacccctgtctgggaattagtctttcttgctctcatatgctgctgacttgataggtggagatgttttgcatgtgagctctagggaaggacctcttagagccggaaaattatagtcaccaggaaccttcagggacaccatgctgtggcatatgtctatgcactgacggttacatcagattcacttgccaaaccttgttcttaggcaatgttcttcctccttccttccctgactcctcattggtcaggaatgaaagaagcatgcttcttccttgcaaagtgctggccagcgtgagcagtgatcctttggtgtttgtttattgctgagtaagcattctatcttccagtgtccctttggtttctgacaataaacgcagggaaaactgatagagaatctccaaaagaaataaggagattcaaccatcgcagttgcctggcttcctcatattctatagccgaaggaaacttcagtgtcgaagtagttagctttttaatggttttaatcgtatttctttctgattcttctttggcaaatcatacgtagattaatgcctggcaacttgtacagttctgaaccccctcccccacccccaacagggtttagtctgtcagacttgattagtgggatcaacatagatagaattcatcttgtcattcagttcatccatttgaaaactatgtattgaatgtgcaccacatgtataaacacaattcagggatcagcttggatcacctccatgacagaattaactaagtgccagtcagtttgtatggctcagcatcagaacagtttggttaaccctgatttttttttttttttcagctcatgttggggaattaaagagaaggtagatgaaccaaatataatacccagaggggaaaaaccactcagcaagcctcttaaagatgacatctcttttgataactgtagatgcagaggctcagaaggttgagatggaacccaattggccttcagaaatatagatgctgcatccaggatttgaagctatgcatttgtctgatagcaaagccaggacttggtacacattttgccaaattcagtatgtccttccatgtcctgtttctgaacctcactggcccacagtcttgggtcaagcttcggggccgtgtaagaagggtggcttcacccaagcccctaaaactctctcagccccaaaaggcctctgtgcctttcctgtttttgttcctgaaaggctggggtggtagccagatatgtggagcaaattcagaggacgtcaaggcctctcttcttggccctaactgtaagtttgagaccttgggctccactccaaggtggagttccggtttgcagagccaaggaattctgggtcatttccagacagagaggtggtcggcacgaagactgctgtggctttgtaagaggaggtggggcgagcgagtaaagggaggtcttggcgtgtgcagaaaggacaggagttaggtttgtttttcaaagaggttgagttactttggggtctaatgtcaaggtcctgtggaggtttgatactgttgatttttccaggtgattaaacattcaatcaggcatttcttcttctttctctgggtagcaggctgtttcaggcaaagccgctgctgctttgatgggacgtcccttctggatagagagaagcatgtcagcactcagggacctaattgcaggtgggtgcggaagctgaggctcacggagatgaggcagagagatgcttgtttagctacacaggggtcagagaaggtctcctccgggtgctggtggatggcaaggagccagacatggaaaatataggggtagaggtagaagctagtgagatgaattcttgggttgtcacggctgctggggctgaatgggtcgcattctgggacttgtaaagaggctgttgttgcttgagatgttgtgagtgacgggagatgaagtgggtggaaatgaaggacctactttgaggtaaaaaccgaagggatttttttctgtgtctgggatgatgtgaggattaggtggtgacttgtttgaaacacttcaaaattcctagaggacaggctcagaggcatgtcagaagttttggggccaactggcatgcttctgcaccgtgtgaacatgcacataactctttgacctcactgctctgccctgtgcatgctgtattctggacaaggagtagggttgtgggtacccacagcagcttgaggctatagcctgttccttgtcccagagtgacatctggcaaggccctgtactccattagcaccaatgatatgtagaacaaagtcgtgcttagggatcgtaggtaacttttcatccgaacatatttacattagtttgtttccttgttgactaaatacctactctgtgcttattcctcagtgaggtcactggtgtagagacccgccctgtgtcgaggaaactgacaatcttgaaagaatataggaacccgacaggtagttatctaccaaggcaatgtacaatgtgagggaggaagtgagtattgctgagaggccagagagcacagcgactctgtaccagccgacctggttccgcagggtatgtggaaacctcagccttcggggagagtgaagatcgaccttgggaacaagttcactgaaagggagcacttgacagggagagatgtggcaacagttggggctattagttagcagcccctctactccagcttcaaatgtatcatacttagaaacacagaaggtttcttctagaatagcttacaaataattgaaatgagaagcaactgcctttatctttgagccttgcttggtgacacacctttaattccagcactggggaagcagaggcaggtgaatctctttgagttcaaggtcagcctggtttacatgagcaagatccaggacagccaggcctacatagagagaccctgtcttacacacacacacacacacacacacacacacacacacacacacacgtcttaatccataattcctcaataatcattgctagtagcaaataaaaggacgcatttcactaaaatgcccgttgctctgcaaagatacctggtctgtatgctatagagacagcaaggtggggtcctatcttggtaatctttcccatcagaacactgaggaggtgctacaaaaatgccgggtgaaagctttctggcctcactccatatgattgcacacagaccttattttgggtcacatttattgtagtgttgtagttgatagctgccacacatgtggatcttggtggctaggagcctgtggagggtatcctgaagcaaacatgtcatataaaagaagtctggagtccttccaaagtcccatctaaagaaaccctgtatgtttttttctttttcctttttttctggctagagttctccaactgatgttgatttgtgcgtattcccaaccagcccttgtttcctgaagattctattttggtccagccattacctgattaagctgttaggcctggcctttgattgtgaggctgcccaaaagtcctgaaatggagcgtttcaccaggggactgctgccctgcctgtctgcatctcctgcatcctgctctggttgggatctgcagtcttctttgctgatggaactctggagggtcggtcacattagtactttctcaattcaggctaaaagcatgggctctaagggagaagtttaagggagactgttttctagaatattgattcagtaactggttcaaagaaaacctctcctaaagctgcttgagcaaattagtctgacttacatgtaaaaaaaaaacccttttaaagaaattaagttttgtttttggtttttttttttgtttgtttgtttgtttttttttttttaaataaaataaccagtttcatcatggtggtatcccgagtgcgtaacgtgcatgctaacagtcatccccttcccgctccctgccattagtctcttgtcttcccactgctgtctccatttctcttcccaaacagctctgttgtacagcgtcacttctctaacagcaatctggatccaacatttgagaggaaacatgtttgcctttatgcgttggttcatttcttttgatctccatctccatccattttttcccccctgcaaatgacacaatttccctttctgttattttaagtaaaaaaaaaaagtaaaacagtgttctgtggtctgaaagcgccgatgactggctgtgctgtgctggcctgaagctgtggacgccctttcctcttctcgtttctctgtaggagccttcacagctgcagatcctggtgtccctctgccatttgttctgttaaagcaatgatcttaaaccataaagtctcactctgaacagcacactattccacgcctgtctctccatagggcctggagcttttatgcctgtttggtagcagtgcgtctgctgagaccagaaactgataattaacactggacttgctgtggctgaggcgtgagcctagcccttgtcacctgtggccatctctatccctgtctaatggacagaaaagggattgctcagctaagcctagacctctgccagggtcacatggcttttaagtagtggggtctgaattacagtcgcagcagttggtgaaaaagtacctgtcagtcactaatcctccttgcggactacccgctgctcttctgctccgagctctttcagctcagcgtgtggatgatgctcagcaaagccatcatgtgtgtgagtgcatgtatttgctctggccttggcttcttcaaagtggagcaaggatatttgcaaagcaaactgggtgtaagatactgtatgtatatattttttatgacttttgagccttttatatttattgatcttgcccacaccttttttttttttttttttttttggacaacagtttcttccataatctgtttttgtaggatctatccaaacattcgtcttcattttcttaggaacaacttctcttcctgttcacacttcttgtttgtgagttggtgtcatgttttaggggtagtagtagtgtgtgcaactggcattagcagtctcaaggcagatacagttggctcccggcaagcacaggacgcccataggcgtggctgatccactcaggaatgttcaatgtactatggatttcccaagtctgcaacaacagaggaagagcccagtgtggtgggtcttttgaattgaagttgctgggaaaaacaaacaaacaaaaaaatcaatcctctttggcgtgtgtaaaatcactagtacgtgtagatgaatctcaaaacacaaaagccagatatagtggcacatgcctgtcattctagtatttggaaggcagaggtaagagaattgtgaatttgaggtacagccccatctcaaagaaaacaaaataaaacaaaaccccaatcaaataaaaacaaaacaaaataaaccttggtacctgtgcccaagagagtgttgcagggtgtggagagtgttgactcctagcagtaactgaaggtgtcagccgcccatcattctccccctaagggtgacgcaaaagatgtggctggatataaactcacaaggtgatcactttagtgtatcccttccccctaaattattcatttcagctctcagaaaggtaaacagaaatggactttcattttttattttattttatttttctttgacttaggacatgtatgggtcatgactttaaatcagtggttctcagtgggtctcgatcccctgaggttgaactcccctttcacaggggtcacatatcagatatctggtatatcagatatttacattacgattcataacagtagcaacattacagttatgaaatagcaattaaataattttatggttgggagattcataaaggggtcacagcatcaagaacgtggacaaccactgttttagaattttctgcttgtgtaacctgtgaattactctggggataagtgtttgaggaagaaggctgcatttgatgtcttataaagcattttcctaagttttaaagttttcacagtctttttaaattgttctgaatggaattttaattttgaaaatttttgattttttaaattttttttttatgtagaatatggatgagatctcccagtgactgaggggaacattttagtgtgtgtgaactgcactgaacacagtcaaacagcaggcaaaatggtgatgatcttgtattatggtagttttgacgattccacatttaataataaaaatataagccgttgtcagatactgctagttttgacgtagaagagtttctaactctagggtaaacttaactgaagagcatgtaagatgatggctcaaagtgtcacttatctatgaaaagggagactttacttgaaaagagccagacaaatcaaggcacagaaataactctgggaggcaagagtacatgactgtcttaatagatttcacatatagtattatatttatttaatcgtttgaaacagggtctcgtgtagtcctggctcgcctagaactttctatttagatctggcttcaaattcagagatctgcctgcttctatcttttgaatgctggaataagagtcatgtgccaccacacccggctcagaaacagtgtttgtgttcatcaaaatcactgtcttgggccaggagggtggcacggtatggagtctgaggcaggattgtgtccaggaattctgagcgccatgctgagaccctgtagtatcttaaggccagcctttctccaatagtaaaaatcaaaacagaaagagaaggaaggaaaggaggaggcctgaagggtgtctgggtgattctttaattagtcaattctgttggtaggagttgaatacttagatgtaaacgtttcttctaaattgtagaaatcccttctattctgaagttttattcactgggaaggaaagtgaccgctgttttctgccaagtacctggaattctgagaaagaggagcaatcatttctgtagatagggtatgtattagtcaagaaggttaccttaatagactactgtggaccaggtggcccaaacaactggaattccttttctcattgctggggcgagagactactacagtaggtgatttaacagtagtctttgttttatgttttcctgaggtttggtctctgcctggtagctaacctccatcttccattgtttctgcatggctcttctacctatccaaatccaaatttcctctccttgtgaagacaaaagccatattggatggagggatatttcattttgtagattcggaggtactatgggttggggcttagctggtgaaatttgaggcgacattagcattcagtgtgtaagaagataatttaggaagacttgcctaatgtgtctttcttggccatttgtgaggaagatacatctctgaagttttctgctgagataatttcagagtatccagtgtacagcttaaaactgacatccaattcatggggtgacagcgttcttatgagccacagtaggtctggcctagctttttgggagctgtggttaggttcccctgcactgcccttcagaggtgccggtgtaggcaccctgctggaaaaacctgccttgccctgaagccttgtggtccacctccactcccaggcagcatcctccagtcggctgactgggtgcttgcccttagctccagataatattgatgcttgagcttggcagagctcagaccctaacttcaggtagggagttagtgtctgtctgctgtttagaactttgtgtcctttagatctgcagtgagaaggcgagtccagagtgcctgtcatagagccaacacaagccaagctttctctgacttttgttattaagtgcccagttgtgggctctcatccagatctcccccatcatagcaggtcctgcactgcgattgcacgcggatgccatccaccctcctagactgaaggttttgcaaggggaggggctgggttctgagtcatagttttggcacagcagcactagaaaattcatagcaagaatatgatagtcatatttattatttaatttgattcaagtgctattgtaagcattttatattcagtaactaacttcattctcacaccagcgagtgactaccgatgtccactatacacgtgaggacttccttgaagtatgtaagcacgcttgcagaagtcactcggctgctgaggagggagcaggccctggctcctttatggattagagaatctgaaaatgatgagagcccacatcaggcccaggacgggacagttctatacccagagaggctgtagagacagcatgagttgtgggaagggaccatgtgtctttgagagagctcaaggtggttgtcattccattgggtgccagccaggaagtcacccagtctgtcacagtgaggccagcagtgctgggctgtatggcagctgggtttgttttgaaattgaaatacatttttcaccttatgcagctcgttgcagtaaagtgatggttagtagtttttttttttttattcgaaatattttgctatagtcacaggtgagagttgtacaactgtcacccacggaatttcagaacatgtgcatcagttcatatgtattagccgtcacttcccattgcctgtcctttcttcttctgggcacttggctgtttgaactggactccttgcacttcgcatgtttcaaggttcatctacgttgtaacatgtgttagcaatccattttttttcccctgggagttgagtagtaaatttcactatcttgatggatactagttttttccgacctttaggctctgatgaataatattgacttgactatagaggaagacatttctatacggaaggtattttcattgctcttcacgatattcagagagtcaggttgctgggtcctagttaattctatgtttaacattctgaagaactgccaggctgtttgctcgagcagctgaatgatttcccacttctgtcagcagtacgtgagggctcaggttttccaagtgcctgccaacacttattattgtcttttggtttttaaccatagccatcctattggctatggtatagtgttgtcaggttttggattccattcccccactcgccagtgatgcttagcatcttcccatgtgtctctggctatttgcttctctttggagaaatatctaggtgtaggccttgggttaggttattttcaaagttattggtaagctgaaaaaaaaatgaagagactgctgactgcttgtcttcccctctttcttaccagttagtcatggaatcattgtaccaggacataatctgggaggatttctttgtaatgggagaaagtactcaacatggtacccaaacaaaactccatctgggaagaccttggcaccttcctcttggcatgctccatgattctgactggagcagtacatctgagcagggctattagcagagtccttcagaggtactgaatgtcctccaacttcacatttaagttatgtgttttggatagaagttcaatgtacttatctgaaaccggaatatactgcacggtgtgccagggtgtgtggtgagaggtgaactttgggaatctcacttcagtgtctatagttcacaggcccccaggtcggaacagcgcctcgaaggaacacctgctacaggatactggcaaagccatcacacacagatgaaattacatgcaacgtgtttatttcctgattcctctgcgccccagccatgacccgctgagttatacccttcactccatgggaccctgcaacgagccaacccacgcaggctccacttcattttgcttttgtgtttaacatgatgtttctctgtcatgcacctcctatccactcgcagtgtaaagaggtacttaaatgtacctagccataccgctggggattatgaaactggtaattcacaaaagagccttctgaattctgaagatttacagctagtgactgcttctgaaggccttgtactcagaggcagttacctcacgctctgcatgtaccacgtgtaccaaaccccactcctgtcttccatggaggtctgtcgtagcgttttaattgtcctgatatcacagtgatctccctaaatgcacatcctttctgcagtggtaacaggacaccttaaactgggtgatttatctgagtacaaatctgttttgctcatgtctctagaggctgggaggtgcccaagagcagagtgccagcagccaatgaggacctcagggctgcattatccccacagtggaacattgaaaggcaagagactggagagggccaaacttgcttttgaagaggtggctcaggggttaggagcatgtttttttcaaacttactgttaagctgggggaaaaaaagatggtgtttttcttcccttctttcttgctacttagtcctggagtcattgcacctggatatagtttggaatactttctttgtggtggaaaaagatgctcaacttcctaccaaatagaacttccgtgtgaggaaatgcaggggacctgagtgtagttcctactactcacatcagctagctcataatcacctctaactggagccctagagggtccagcagctaacacaatcacaatacacattaaaaaccaaatcaaaataaacctgctcttctgataaccaatacgctcccacagtaaccaatacgctccccacagtgttcattgtggggacaaagctttctggtctaatcacctgtaacttgagccaccacctttcactgagtgtgaagtgtaggaccttggggaacacattcaaaccataccattttatttgtaattcaagaccagttttctaaaagcctcctcattggaaacaaaggccagttgatcagaacctggaagttctctcatacagttggaggcctcagttctgactagttccagtttctctcctatgcggatctgatctcattcactatacttaattttacccttcctcatgccttacatatttccaaagttctaattttaattttgtgtgtatgtgtgtggtgtatgtacttgctggtataggtgtgtgcacatatgtgcttgtggaagccggagatggatattggcatctttcctcggttgccctctacctttgtctatttagacaaggtctctcacctaaactggaactcactgattctgctaggccagctgcccagggagcttcatggggctgcctatctctgctcctcctctcagtactgtggttagaggtgtgcaccgtctctgcttctcctctcagtactgtggttagaggtgtgtaccgtctctgctcctcctctcagtactgtggttagaggtgtgcaccgtctctgctcctcctctcagtactgtggttagaggtgtgcaccatctctgctcctcctctcagtactgtggttagaggtgtgcaccgtctctgctcctcctctcagtactgtggtttcaggtgtgcacctccgggctcagctttttacatgggtgatggaggtttgaactcttgtctgcctggcaggaactttttgactgagctgtctttccagcctctcatgattgtatcttttttttttttccattttttattaggtatttagctcatttacatttccaatgctataccaaaagtcccccatatccacccacccctactcccctgcccacccactccccctttttggccctggtgttcccctgtactggggcatataaagtttgcaagtccaatgggcctctctttccagtgatggccgactaggccatcttttgatatatatgcagctagagtcaagagctccggggtactggttagttcataatgttgttccacctatagggttgcagatccctttagctccttggctactttctctagctcctccattgggagccctatgatccatccattagctgactgtgagcatccactttgtgtttgctaggccccggcatagtctcacaagagacagctacatctgggtcctttcaataaaatcttgctagtgtatgcaatggtgtcagcgtttggatgctgattatggggtggatccctggatatggcagtctctacatggtccatcctttcatctcagctccaaattttgtctctgtaactccttccatgggtgttttgttcccaaatctaaggaggggcatagtgtccacacttcagtcttcattcttcttgagtttcatgtgtttagcaaattatatcttatgattgtatctttaaggaataaattagttaacttattaaggaataaattagttagaataagtgtatctgtactctaaaccttagattttccaggtatatttttgtataagtagatacacagatatgaatggacctagcagaaaaaccaaaacgtgtgctgctggcataaaagcaagcagaccaaaaataatgagtctaaattacaagtacttaaattttatcccaattttatttgtgcaaaataaatctagcagtaagtcagactttattacaggtcaaacttgagaccagcaaccttgaaatcatctttcctagttcaaatagggccagttataagcctgttttgcatctcctgtgtccctaggtttgtctgtgtctgaccacagacatatgtttgtatatgtctccacccacagagtgtctggctgtgtgacagttgtaagtatgtccatctttagaaatagatctttatctttagtgctaattacgtctcggcttccttcacgttgtcagggagtaagtgtcctgggagaacccgtgtgcagttggcaggatgctgccttctgactaatagtttgcaagttttctcctgcagttcactttacaagcccagtggcagtcagtgtctgatttactatcagtgcaacagatggaagcagattgtttcttgctgtccagtggcctggtggctgctggagctggagccatgaaccttgaccttatgtttattatttttcatagttcaaggccagactgtgcagcacagctttctttttctttccttttttttttctttttgtttttgtagaacacttcattttctgtatgaaactttcaaaacatatgaaagatgcttggactttcgctcttgaggtcagggtgccgtcttcctttgaattccttcagagcttgagaaatcaccttcctaatgagacttgatggatagcagtgctcaccaccctcggatgaagctgtcagtggaggctcctttgcccagcacagtgtatccctgctggtctcacattgaggcacagtgaaacttttccaaaagcacagggaatatgaagagctccttctggctgtagggacagttgactcaggatcgaggtcttggacagacagcagagaccttgtggctggtggcagggagtgatggtgctcagggctgctgcctgcaggactcctccaagaggcctgtgccactttcaaccagccagtgctgtttcctgtttcctgcagctacgactcttggtggatgtaccctgaccctcagacaatgcatctatttaattacaggtattagggacagaaccccagggtcttccctgtgccaggcaagcactctaccacagagctgtagctccagatcctgaacggcgcttttaaaacgccctttagtcaaggacaacttttccttaaatgaactcttccatggcagcagtttccaacctgtaggttgaggcccctttgggaatcaaatgatccttttacaggggtcacatatcaggtatcaaatatatcagatatttacattacgattcataatagtagccaagttacagttatgaagtagccacaaaaataattttatggtggtgggagggtgtcacaacaggaggaactgtattaacaagtcacagcattaggaaggttgagaaccagggtcttatgggcaagcataatactctggtaaaagatgagctgctctgggctagagctcagggagtatgtgggggctgggaggatcactgcagagaagcacaggcgaactcctgtgtagacattttttatcatctagctcaatgtcagtctgtctccctgctcctgtttctaggctctgttcactgccaacagcctggggatgatcatgggactgtttgctgctggttcatcagtttgttttcatggccttcagagtgctattaatgtcctctgtgttggcctttgtaggatgattgctttcccaagcacgaatgcttggaaaatgctttcttgtgtctacacaagaaaaccctgaacaggtggggccacttgcaccagaggttacagtcttctttaaaatacagttccattgtcaaggtttgtttgtttgtttgtttcttaaatactaataatactgaactaatcggtaggggctacgatagccctgtaagggaagagggctgtgcactcatggcaggctctctcggcctcagttctatcagctttgatttttaaaaaaattttacttttcatattgaggtgattgtagattcacattctattgatattttttgggaagctcattgtttgtggtgggactggctcatggtttataatatatttaatgaatctttggtctctattcactagataccacaaactcccttctctatatgtgaaaaccaaacgttctctagaaatcttcatgtgaatgttccctagggcagaataggtccatgcctgtgctatgaaagcactttagagtcataaggagtggcatggggactctaccattgctggaatgattttccctgacaacaggagaagttaaggcagtctcatgcaagaagaaacccagtgcagaggttttggggcctcaactgggcagaggaggaggtgtcagaggagacatactgaaaagaggtgactgctgtctctgtgacattgaagggaacctgtgggcagcctcttacaggaagctccaggaggcaatggcaataggctcctatgcttttgaggtttgtgacaaagatagagctggagaatggggagaatgatgaggcaaggcccagagtaccctcagctatccctgcccctcactggtacttactgaatagaggaggaactaagaactactggtctaccttgctgaggatgaggctgggcttgtggaaactatgcaaaggcctgagggggaaaagcctcctaggaaaactgatgcaaggccttccagattttgtgagagggagtgtcaagtcacttggaacatagtgggtatttgaggaaaagcctgaagctactctccttttgggaaagggcaggaatttagaagtagggcagggtttcttatctctttaaaaagctgccttttaaagtaggaaagattaacttatggaggcctactggatatctgagcaaaattacctcagttcagatgctgagccgtctcttttgtagtcattaacagcagagtatttatagtgttttaaacactaaagacttagtgtttgtaagcctctgtcgggattataaaaacagaagtatatttggaataccgttttcattgttttgtgtgtataaaggaccacctaaaatttaagatagtgtatatgacattgaatcatgttaattggatatgtcttttgttctttttgtaaatatgattctaactaaatttctagtaccaaaataacgaaatgtatcattgtcaatgaggaaaaggctgggagggagatggcatatggtacaatattgtacatgttgaaaaatagtgccgcctggcccagcatagcttttaggtactttggatgtctttgatgggaggaaacaaaagtttgagcatcatttaacatgctttgacttaaattgttattgcatgtcattctagaaagaaagggtgtcaggaatgggcttagggttgagaacaggggtcaggtgcttatgggcatgaggaagtttaggcgatgactgtgataaaggtcacaccactgtcacctgtgcattgcagaggtgggctgtctgctatagaaagttattgctgtctgctttaatggtgtctaatacaagttagcagctctcatgtctccttgtttgactagtcttttcaacagctgctgagtgtaaaataagtcattttagtcctcagggatcatctttatgaaaacaggatgaggttgtgtcaactcatggaattaatggcaaagcatttggcacattcctggttcatggtcattatccatggccattgccatattcctccctgtccctgtcataaggcctcgctgtctagtacaggcttaatgcagagccttacctgtctacatgctaccgtcagagtggggcctccaaaatgaaacccccactcttcctgagtgtattgctttagtaaggacctcatatgccgtgtgtgtgtgtgtgtgtgtgtgtgtgtgtgtgtgtgtgcgcgcgtgcgcgcgtgcttgtgcatgtgtgttccaggtgctctgctgaccaggacctccatgacactgaacccttcaccgtcccctatttctgagccttctttctctctttctctctttctctctttctctctttctctctctctctctctttctctctctctttctctctttctttctctctctctttctctctttctctctttctctctctctctctctctctctttctctctctctctctttctctctttctctctttctctctctctctttctctctttctctctctctctttctctctttctctttctctctttctctctttctttctttctctctttttttctctttctttctctttctttctttctttctttctttctttctttctttctttctttctttctttctttctttctttctttctttcttttggttttttgagacagggtttctctgtgtagccctggctgttctggaactcattctgtagatcagcttgcctctgcgtcccaagtgctgggattgaatgtgtgtgccaccactgcacagctgccatctgtctttctgttagtcagacttaattacctttctcctgccaaccccagttttttcctatagcctggaggccaccttagactcccagccttgtatcccagcccccaagtctttaggtattctcattaccattatgtcccacattctgctcatgagttgtggcatctgccagtaatacctggcacaatctgcagcaaccaggacactgttgataaatggaaaccatttgaagggatggatgtatttctgttgcccacaaggacacagcttggctccaggtatgatttagaagcttaaagtccacctttcccaaggtcattccaaattatctactcatatgaaaatatctttttgaaagttggtgccatgtataatgaacatatgccaatctaaagggggagggacaccaagatctatagcccttctctctatggctctttgttcaagggaaaactcccttttgactctcagagtgtgaccgtgcctgggaaagggctcttggtctttgcatgaagtagatgatgcttgtcacagggaaaatcctttttgcctgtgatgttggcatctcctggtcccatggtggaaatggtctatttgcatggggctaggagagagtacccaggagccagctgttaatctgtaaagtcttgcttggctgtatccaacatgtcaccattcttacaggtaactgctccctcatgtagaggaagctgtaagccagtcaggatatgattgtctaaagacatatgtggcagtagagttagggtgtgctcagattaaatggggtttcaggctttatggaattgttaagtgcatttatttttttatttcgtgtgtccgtttgtcctttcttccacttttcttcaggagtaggagaaactacaggccagcagcatagccttggcccatctattcttcctttcctaatattactaacagcaatagcaaaaaacaaggactcccaagatgtcattggttgcccccacttcctgtctcttgtttcttaccaggaaccagggcattgcacaaaaatgaagatgatttacacacttgtatcatgaggggaaattaaacgtctgtgatatgactgctggaaatttatcatacaaacaagtgtggagagttacacaatgcggtgttctgtttgtgacagtctgtgtgtcgattgaaacaaacggctctagccacccagaaaagactgtagctgtgacagaagaggagagagagggcatgtggagaggctcctattctacattgttcagaggatagactgcagagcaatatacatgtaagaaagaggtatgattatgtatttgttcatatttacagtacattgagagctcctggctaggctccagtcagtaatgtgtcaatctagggggaggactgggtgagagccaaaccctcagtgtgtctctcttcatagcatggcagttactgaactccacggctgttacctttctaaaggttacacagttatacatgaataaaaacaatacctagaatataagttttcaatttaaaggtttataagtagatgaatttttttttattaaaaccaagttgcccaccagtagattgccctgcaaaaatctcacagttgctataaagctttcacgctgcccttgtgggagggacagccgtgggtttgccttccttctgtcacgaggctgggaaagtagatgagtcagcaaggaactcctgatccctgtcagtctctgtcagggcctctgtacatctggaagcagctgagagctatttctttcccagtgataatgcccaccagcacacagactctggcattaaagcggcaccatggggttaaattccttgcctgtgtgttttaccttttcaattttgcctcatgtcttcctattcggttgcatgtcacattcgactagaccctggtgtgtatgtcctgtgtcctgtggactctttcttcttcctccataagaagcaggagccacatatcagcaggaggagctagctggggctgagcagaacctccaggtggttgtggtgagcgaggctttagagaggaggccagggaatggcagtctgtgtcaaagctcactcacaggctcctttgttctgtttattcacatgtactgaacagtgggtcatccctgagtgtcttgtgacgtgcagatggcgcacacattgtcatgttctccacagggactcagaaaaacctggttcacttggcacaagctctgcagttggctattgcaaccttgtgctccttaaagaccagtgggccagagcatgggttctgtgtggccgctggcctttgcatctagcccgacagatgcccccagaacagctctgctcccataatagttcacacctgtaccctcagctgctctcaggaagcccagaacttgctattggcacttgagatgttgtcaaaacacagccaatccatgagcctgctatgcacctgatgagcagctttgctttgagcaactattgtggttttgtttgctttcttcagactgagacatttccacattcatgaacctttccacggtagctgctcagtacagatgtgtgttccagcagtgctgattaagtgctggctgttactgaagggcttcctctgtgcccatcttctcgctgcttccaggtgactcccagccctcaggttttgttttgtttgatttttgtggcactggaggttgaatgcagggccatgtgtgtactaggcacgtgctctctcactgagttacatccttggcccttgacctcagttttttttaaagtgtattttatagattgtatataatcttataaacagtttaagcaaaggagcttaagtattatattgttcttttatactcatctgaatattttttaaaaacttttttctttctagtgtaggggtcaggcagtcttttacgtcaggggtcaggtataacataagcactttcggcttgtttgccttctgttacgcaggctgtacagtctcctgcagttcctaggacatgcgtgagtaggactgttggccagtcgaatgttactagcaccgatgtttgactttcatataattttttatgctatgaaatgtgtcattccttttgatatttttaaactatgaaaatacccaaacaaaggtgagagggagagaggacaagatggggaggggagtaaatcaaatgtatgatatacatgtataaaattgtccaaggacacatttaacttaaaaatgccaaaatcagccctgggagatagctctgtgactaaagctttgcaaatatgaggacaggagggccattgctggagcccacagaaatgccagctgtgtcataatgccagtgcttggatgctggaaatgggggacctctagcaatctgactggctacactggccttatatatgagtgctacccagctacatgtgcattataagtgagccctggattcaactgaaagattgtaccttgataaataaggtggagaatgatctctgctatcaaccttgggcctccacatacatgttcacacacactcacatgaacatctgttcacatagatgcaaatacacagacacaggcacacacacacacacacacacacacactcaggaaaaaatgacaaaaccaatcttataagatgtaaacagataggcacgtactggacataatccatgggccataatttgtgaacccttactctgtggagcactgagttttagacatgtctatgaaataggaggtggtattctgatagcagccacagacagtgcaaaaccagaacacatcttaaccaagtgacagggtcaagaggtacattcagcctgagaatgtaagattttgggccatggagggcaggtcaagggtttggaacagcaaggctctttctgttccttcccttgaagattggtagcatctttcagaacgagtaggcgattactgactctttgttttttgagaaatatcttcactatctactgtgactattatctcctatgagaacccacctgtagttccagctctcagaagggggagatagtgtaggatgttggccagctagattagccttattgctgggctctgggttgaaatgtgagatcctgtttccatacataatacagagcaattgatgaaagtttctttgtcagctgtgggccttcagacataaccaggacccttgtgggcctcagaagcccaccacaaggcttatctataaaatctatattcccagctacctggggtctgaaattggaggaccatttgatcccaagagttcaaaagcagcctgggtaacataagactgtgtctcaaaactagaaaagaaacaaacattcacaagctgtgtgaaggacagaatcaatgctcagtgagtggcccatgtcctacctctgcagcttcagcaagagaacctcatcactttgatgtcccttctgcgctcttcttatgcacaggtaactacttgtgagaagtgtgttccctatcattctgttactttcttgtagtcttacacaggagttcttatccctaaatagatgtgtcatgctgcttaaaagtggagtgaccgtccatgcattccctggggcttgcttttgtttcagtcagccctgtgttcctgaggtccctccttgccttgtgctcctggctgtgatttactcagttttaccataggactgtattccatcaggtgcgtgtacttatccattgtgctgctgaacatttagtctgttttcggtcttttgttattgtactgttgggaatatccttttggatgtgtgttagtgcatgtgagcatgtagactgccatatctggggatccatcccataatcagcttccaaacgctgacaccattgcatgcactagaaagattttgctgaaaggacccagatagagctgtctcttgtgagtctatgccggggcctagcaaacacagaagtggatgctcacagtcagctattggatggatcacaggacccccaatggaggagctagagaaagtacccaaggagctaaagggatctgcaatcctataggtggaacaacaatatgaactaaccagtaccccccacggagcttgtgtctctatctgcatatgaatcagaagatggcctagtcggccatcactggaaagagaggccctttggtcgtgtaaactttatatgcctcagtacaggggaacaacagggccaagaagtgggagtgagtgggtgggggagtgggtgggggagcatgtgggggacttttgggatagcattggaaatgtaaatgaaataaatacccaataaaaaacaaaacaaaacaaaacaaaaaaaagtagaaagtctagcattgaaattttattttattgaacacactagcaccatgtatccatgtgccaagctggtagatctccagggtacttgccctgactcttgttgctgtgatccattcattgtattgcttcttcagaacgatgcactttccaccctgtgcatcaggaatgtgttggagacgactctttaaggagaatcctaccagtactacttcgaatagttctaaagcagccttgattgttcatttcgtgtgctctgtgctatggctatactttgtgctgtatagtgggatcctgtgtctgtttcccaggtttcctctaggccctgttgtaaaggaagtttctttttcagtgtgacagttgtggggctggctgaagtctacagcttggctgtcttaggatcctcagggaaacatgtgtctttctagggttgtgtcctagggcttgtttgagcaagatttttagataccacaactggaatgccccaacttccttatttctcatcttttactgtctgtcttccctccagtcattgccggccattgacctcttccctctccttcttaggaggccagtgaacttgaaaagacttctacatttgcatttactctggaactttagaattctcccattcagccaagtggtagaaagctaaacagcccttggaagttacgttagtaccagatgatagagtgaccgtggcttctgtcaaggaaacattctgagaagtattggtttataccaggtctcatcattctgggtatttccatcagcaatcctaaatctgagcatgtggatggagtacaagagagagttcacaggaaagggcataaggccctaggttgatcccagccattccaaacatcaggggtgagcatgggagagagtatacttcatactgcatacttcatgctgcaggggagtgtgggggagagtagtattgacctggagagagacacaagagaggggcaaatatcagagtctgtgggactgtcaaaggcagcctgtttactggttgagagaggtttaaaccccggagacccagcagattaatctgtaagggacagaaggcctgtttgccatgctcccggactcctgatatgaggccccagctccataattctgtggccatcagtcacgtaggctgcctggactccatcctcacagttacctggcaacagccaggtatgttcctccccacagttacctggcaacagcaaggtagcccagccccactataaaaggagctgcttgccccctcctcactctcttgctccctctcttaccctcttgttcttactcttgcctcttgccctccttctccccattcctttccccctctctccatgggccatggccagcctaagcttctctactcttctccctctttctgcctttctacaataaaaaccttaaaaccatggactgcctcttctcatcaggatccacagtgctggagcaatggagcagggttctctctaatgagctgctgggaagcctccctgtgcaacaacccgggcttccaccaacccaagccacacaccaagctagctgcctgagctagccaggctctctcctccctgaggtaacctgccacagctctcctctctgccctttttccttcggcccctaggccagagtccaccggagggggtcccccacccagttctcagctcttctaagaaatacagcagcatctgggatgtctgaaagtgagaacctgtccagactgagccatccccattggtacaagattacaaacactttgcatggccaccaaatataggcttgtacctgtctgttgcaaccccaagtatctgaggggtattttgggaagttggtgttttgctttgaaggtggtccctatagggacagtttgtgaccagagactgtgatctgatttagaaatctataagaccaagattatttactgactcttatcacatgcccttgaatttgaaggcataggccaggagagatcaggggtcagtaacattatgagtcttcccaggatgccagaatctcacaggtcagacattacctttctgcaccccactctggagtatgtaggcccgaattgattgtaaaagaactcgctgggtgccaaagcctctcgccctgctctaaaaggggagcatgtgagctttgcattgcagatgtgagttttatttttaaactccccgagtgatggcgtgcaagcagtgacgcatccacagccagctaatctgtattgtgtaaaaacacacaaaccacaaattatttttaaaagagaagaaggcagaagaacagatgcagccaactccccgatcacgtggatggagggaaatgctaccccagcggcaatactgagcagtggcagagctcagactgtcctgggaggaatacgcaggaagtggacagcttgcttctttgggtagctgacctgctgtccatctccgtgtgtacttatttcttctttttctttttgagaatgaattcttcacagttctgtgtgtatactgggaagaatggtgactaggagtgttcagtaacttgaccagtgcagccttacctgcccttactcaggtggaagataaacaaattgatctcatagaagtagaagctattatgatagccagtcaaggctgcaaagagatggggacttagtatatacagcagtggctctcaaccagtggatggtgacccctttgggggtcaaatgaccctttcaaaggggttgcctaagaccatcagaaaacagcagcaaaattacagttatacgtagcaaggaaaacaattttatggttgggggtcaccacaacatgaggaactgtattaaagggtctcagtgttaggaaggttgagaaccactagtctggagggaagcttatagaatgcactttaggatgggtgtaccttacagaaatttgtatgttatgaagagttagtatagaggacttcaaagcttctggacagaaggaaatgcttaagagtttgagagggaggtactaactactttaaatgggtcaacaaacataccatcaaacattgtatcaagctttcatattgtatctaaaatctctgcattgtatataagttattatccccatagaaggagtggagatgtatcacagtggctatagcctcacatgctcaaaaccctggcttcaagcttcagcactgtgatctgtagatcaacactagctatggattacagatgtcagagtttatgccgtaacccaacttctcttatattttaaagtgcgattgcagtttacaaggaagagaaatggcactcgcaagaccacggcacaaaattctgtctgcatggatgaggtctaggacaaattgtaaaaatgtagaagcgttctgctgtcctccttgtccccagtcggagtggacctgctgtacccccggccccggcccaggtggatcggttgggctgcttgtcccttgtgaagaagaataatgcccagttgtctctcacccagatgggaagactgacagagtattccttctttccacgggcttttgcatggaggcgagatgggagggcatccgaagtctagcctggtccctgatctcttcaagatctcacctggatcctctggggctcaggtccaagttatagagggaatgcccgtcctgacaagtgaaacaaaaaggcatatagtaggtcctgtggtaggggcatgggatccatagatagttatagctgggatataaaaatcggtttcaggtgggtggggtatcaggaagaatcctagaaggactgatggtgaatggcaagactggaaatgctagctggaagttagataaggaggcccagagaacaggtctggacagagacttgaagtcaggagacaaagggttaaatttagagtgataaaagggggacagtgtggctagagaagagagacacctcaaagtaaggcaagggtcaggagcagagggggaaatctaggtgggcgtcaggaccacacagcggtgtgtgtttaccctgaggacagcgggaggctcttgtagaagcggaagaccctcctgtgttttactgtttctgccagatttggtcctccactgaggtggatcccaccttctcagctgcacagttacagtcctggtttccgtgagaagggccattgaaacccattagactctaagctaaggaaggaaggaagaggaagggtgcctgccttgttcaaggaagaaatgaagagattcagatccactctgaccagcgttaagtcatcagaaagagtttgcctggcacaccaaaaaatagcttaattgccttcccatagctcactagcccactcccattcttaggagtgcctggtagagtcagggactctttaagtaacctgcagtatgggacattgacctcttgcttttcttcagtgacaaactgtcattttgccatttctcctgcgaggcggtctttactttgacttgctcctctcccatcttttacttcagtgtacccagccccatgttatttccagaaacctgcacatacatttacctttgtctggaaatatgagaaactctggagttcttgctgggtgaggcctgtgatgtaagattaggctctggtccacactgacctgtttttccttctagctcttcttcctttagagttcttacttaaagagttccattcccctaccattctaaccatggaccagcaaaattagcattaccggagagcttgctagagctgcaaactcaagtgctcagagttggcagccttccagggttctcaggtgatctgtgattcaagtgtgaggcagcctctatttgacaacttgatacaggtgttgattccaaagctgagaggacaatttgccttctgttgtgtgcctccacacaacagtgcagggcaggaccagtctatacgagagcttggtaagaagatcttgaggacatagatcattccagccaggtctttgtgtggaatcctctctctggaacagcgtgggactcctgtcagggcctttgcataggaattgtctggccaggatcttatcagaatttgggttactctttattttctggcctagatttgtgtttcctgcctcatttactgcctgtgccaagtatgctggcagaaaatgtttgttgaccatcttatatctggggctgtcacctggttctgagggtgacaagcctggtattcaggactgaaagggtatctgtggaaaacgaaccgtgcagattgcatgtcagtggctcagtcctcagaacccagcttgatgcaggtgctgaacaagctgttcttaaattaagccaaaatttcttggatgactcgatgtgtctgaggactgagccatttgctttttgtgacccaaccccacagagtggaactactccttattaactgtgagcctggttttaaaagggccaatgggacccaaggtcatacagtttacatatgtgtggtggctattcctggttgtcaacttgactacatctggaatgaactacaatccagaaatggagggcacacccgtgacccagatcttgaggctggaagacacaggcttctgacacagatcttcatatggagatcttgaggcatagtggccctaagaaagtttaggtccaggcaatgcagaataggcttttaatcccaggagactgagacaaattaaattccaaagccatgcatggtagtacacacctttaatctgggtcatacctactccaataaagacatacctctaatagtgccaccctctgggccaagcacattcaaaccaccaacacatggaagtggggttggaaactagaattcccgagtctgaagtccagctctagagccctgtgaatcagaggattcagttctttaatgtcctaagcaggctggtcaaattgtttctcatagacaaggtctcaggctgccttgtccaatccttcctgcatccttgttcttgctctggccacatacctgcttgcagggcgttctgatagggctggctatggatggtggtcactttgttggtagacatgttgaggacaagtattgggtactggagttggcatctcgggtttgagttgctagacccaaagagggaagactcttggagtgacttgggccaaacccctttaattgttggttaactgttcatcgtggcgcagcttctcagggtaggctggggtgtctgtgtttgaagtgtgcaacacttcagatgcaactgagacgatcttggttagagaggagaggctgcccgtgagagaaagctgccaaggaaagcagagtagtttacttatcacgttctattcagtagcatttcttgtctgtggtcagtttctgtccctctcttctcctactcagaacggtgaacagagcaaagtggaaaacccctggacgcttctctcttacaagcctgacttgtccttaccatgactctccaggtcagaaagtgtttgtaaaatgctaagatatgattagctgttgacgaaagactatcagcatttcgcatagctgcctgggggagtagtcttgttgggataggactgtggcaacaaactaacatcagatcccagatcctcatcgttggggctgaagggcacaggccaaatggtgtaataaagatcaggaagtgggccccaaattatttgtgtacttacttcttaattagaaaaaagcatcataaaaatatattatctgactatgaaaatttagtattcagaaaagcaaagctaatgaagaaaaatcactcttaatactgccagacagaaccacttttttttttttttttttttagattccagcaaatattcgcttagtcttttctgtgctcattcatggttaaatgttatctgcatacttttacagaccaccttttaattcagtatttcagtccttccccaagttccctttcaatggcattgaaaatgttcacactgagtacaggcattatagtttatctacaaacagcagccttaatgatgatggtggtggtgtggctaggggtgatgagtaacttgtttttagagacagaaactagtctgaccttcaaccccctgtgtatcctaggctgaccccaagttcaggggtatcatcttgcctcagccttctgggttttggaatggtaggcatttgctactgtgcctgatttgatgagtagcttttgtttagaacatgttttatatcaggtactgttctaagttttacatataaatttgatttaacatcacatcatttcataagataagtactgttgtaattctcatttaataacccccctccagtcccctctcatgtaatgtggtcaaatctatgcacaggcctttagcatcctaggcaagtgctctcccacttaaatacactccagccaggtcgatactggctcgaaaactatgtaatagtgaagtgttgatccatgtttatagacagagttgctctcaccgatccctcttctttgctttggtttgctctggaggtggccctctggtctgtgagatgagagtgtgagtgtctagtgtctgctgaggatggaatgtgtgacccaggaatctagggagagtgcatcttcagttgctgggttgttctccaggaccagttgtatcagattactcccctggtctttaccacttcacattgttggttaatccagtctcttgacttagtgtctttctgtgagactgaaagttccttgtgggcaataaccacttctcatgtggcctgttacagcaaagtgtgctgtgctgggcattagttctatttttattggtttggcagaaaggaggaaaattctgtcagtaaaccaagatgggatttgcaagtgggtgaaacaaattttagagagggcagaaacagaaacatcgaaatcccattttggttgtgtcgatgagggccactggcctccctctcggaggctctcggttcatgagatgtagatttgagtgggcctctgacatctttgcagctgcatgtagaacagactgggaaacacaggagagtggatctctgggtgctatgaaccaggaaagcagatggctcccatgtggactgccctttcctggcatgtatctcttctccctcctcagtgtcctgtgggtaagctctctagagtgtctcaaagagctcagccctaccgtttgtccatggattttagggatagggttgtaaacttgttaggtcctggatctatgtttgacattgtggagtatagctgggtaaatcatgggccgttggtgacagagattatctttcagttgtgacaggttagataagcagaaagcagtggccctggtctatttctcttcatcaccctggcttaatgtcaagtcattctgttcctgaaccacgttgactttcaatgtggaggggaggtaaatgtgcctggactccttggcccaaggcagagtgtggtagacagagcgatgggaatgagactagcgataatgttcgtcacttttcagctggagcaaaagccaagagagacccaggttctggaggccgcagtggtgcaggctggtcacacagtccttcccacgatgttgctgtttcttttcaaggagttcatggctacagattcttcaaaaataaaataattaaaaagacacatacatggaagaaagtaattagtcttatctcctaggactgataggagattaaagctgagtcatgtctgaaccattgcaatttgattgttttgtgaagaggaaaatgttgtatatttatgtggcagtggcctgtaaggtatctctgctgtctttcccatactctcttcatttcagcccaccatcacccccaaggcccctagcctggtcccttctgttcccgttcccatcccacctccagtctatcagtaaaatctatcctagttccccttcccagggagatccatatgtcccccaccccacccccagcccttctttttacccagccctctctgggcccacagattgtagcttgcttatcatttacttagcagctaatatccacttataagggagtgcattccgggtcggcagttacctcagccaggatgattctgtttctagttccatctatttgcctgcaaattccatgatgccattttttttttcaaatagctgagcaacactctgactgaggacaagttgggtctctgccttttgtcttttcctcctcttgggttgctgtgtccaactttgatatactttttgcttcatcttatatcttattttgtcatgttcggttgtcctaatgtgatctaagaaacaagtgcaggtcataagcgtgactagggattctttttgctcagatatagtggcctgaggttgtgtgtgtgtgtgtgtgtgtgtgtgtgtctatgtgtgtgtgtgtcaatgtgtatatttacctgtctgtctctgtgtgtgtctcctctgtctctgtctctgtctctgtctctgtctctgtctctgtctctctctctctctctctctctctctctctctctctctctctctctctctgtgtgtgttttactggagattaactagggccttacccattacaggcaagtaatctagcaaagggaatttttctacagaaggccaggggtagtcaagagtagcacagatgaaactccttagaaattcacccttggacctggggtagtgggcccaggggactagataaaggcaggaatctgctgagcgtaactgattccagctgccagcgtggctgagtcggggctgaattgaggcttctctgtcttccattcacatgttggctctgtgcatagtcaggtcctgagtgacgtggaggccttgcctcacaccagttggactgtgtcagctctgctttcagaaggctgagtggtaacagtgaccagagacactggctgagaaacagcatcttatccaaagaatctaagaaactggggaccctccttggtccaagagtcctgctaggcaggctgactacagtctcactgccagccaattacaataagagctgtggatgctgtttaaaacacactggaagcacagttttaaaagttcagcaggaacaggtaacattcactttaggaacttttcttttatctactatactaacatttgtgcacacagtcactataaaattacttttatatataaaattttgtgatatacaattattgcagaagtgccttctattctcttttaatgctttgaaatcttcgtgtatattttacctggatagacagcaagagaggagggctttagtctgcccagtacatgaggctcttctaaggagaagatttgagcacaagacttagatgaggtctgaggtggtaagtgggaaggggtgggcagtgagtcctgaatgctgtatattcggtgagaactcagcttggcatgtcttgatagcccagacaggtggggcccctgcttgaaaccctactaggtgttcataagaaaagccagggatccagcagtccaggctggccagccactcacaactcttcataggcaaagggtgtcttggggatggtcttcagcaagggggtaggcatatgagacatccactgctagaaattgctaataggatggcctcaattctaaggttgctttttcccccctatagatcccacagttttcgtttagcatctgaatttagattattgttcttgtggttctgtagagtcatcaaacacattcagggaagacgtgtgcattactgtctttcattctgggcctggagtcatggggagggtgcagacttgtccccttgggatgctttggaacccacatgaatggaatctcactgcgggttttcaaagcctagacggagagctgggctcttgccccctgtctgctctcgtcctggttcacgcctgtgctagagtagagacagcagcaggctgcagcctggtgccctccaggaatggagcacctcctctgcctcagcagttttatttttatctcatcagcttgttcctgcttttgaagtgtgaatcctagtgacccgaatgaatgagcagtctgcctgggcctgggccagggccagcggaaccaggttactagagttcagaggagcccctgggcctttggaagcagggatgcttgttcctctgtgtttgaggggggaggggtcttacagggcagctttgctgtagccagaaacaggtggctgacagggtgacaatttctcatttgagaagacactttgatgaacatcaccagggacctgtattctccctcccacatcccttcaatagcagccctgtaacaacagcaggcataagtgtatgcaagttcgatgttagcatttagaattgcagaatcaagcatgtgtacctgtcaatgtctggcccctttactttcatgtttgcctgtgggaagccctgtggcttgctgtgtgctggtgtttcagaacaggaatgccggaacatagttcatgcttgtgttaggacatgggagcatgttcctgtcccgggactgtgaggcagcagtgactgactgcttggtgcttgaggcactgggggaggggatgtgacaatacagtaatgacaggggatggggtaggtgacagaatgttagtgacggaaaagccccacacacctgagtcataatcagttaaaagaatacttatgggacccctattccctatcagaagccgtattaatctttctatgtgccccgcctcccaggggtgaagtcttcacaagccttatccttgtgagtggcaatttcccgtgaggctatagttcttagaccagcgttgtcatcatctggatgggaacttgttagggatacatattttcaggcatcactcaagtccagggtacgcagctctgggttgttttaatgaatgccccatccttgccccaggtgaatctgatatctaggaaatcttggggactcatgttagcaagaggagactatgctaggtcatgtgttcttggatggctagagcaagcatgctgggcctcactgctgtcagctacagataaaggctggtaacagtacctgtctttaaggcttgtatgggacttgtgggtcatgtatgacagtgttgggtgtgtgctagacatatggtaagtgcttgctctaacacactcaaatttagtcagctttgatcctgtgtctatttgactttaaggctatttattcactagattatactgattgtcccttagaaacctaatttacttagttgttaaggcatctaatttccctacagtaatgagggctgcctttagaccaaggctagccatgtggttttctctctgcagctctggcttgtgttgcggttgcttggagaaggattttctgaaccagcgttgccatgtgtgagcttctattggtgtcatgtctgtcatgggtatgtggggtgttgcatagtctcccttcctgctgtgaacttggtgtgggcttctgatgcttttctgtgactggatttaatgggaagagctttaaaatctcccccgaataccttagactgaaggagtcatgtggcgtgcatgtttggagcaaatctgctgggcattccacgtggtttgaggacagcacctggcctagtaattaaggtgctctgtggccccatgccatctcctaaagggcacgtgggtgtctgtggctgcaggaatcctcgccaaccatctgtccatctcatgaccaccgggaactttgagccccattttgttgatagggaaaacaagactcaaataagtcaactgtcattctgtagtgcttagccatggccacagtgggaaaagctcttgttttgatagaccttgggtctgcatgtatctggaagcgaggattggggcaggactgggtctatttccttggagctgtgtcctgaagagccactcatgtgctacttgagccaaccttctgtgcatcttgaaggctattcccagaaggcagcagttctcatatcctcatgacctcaaatgagcagccagagcccacttagcacggggctctagtgtagatgttctttctcccatcagtcttagctccttctgtgtggaaattccagttcaggcgtcaggagaatgatcagagtgctgttttggttcaaggccactgagagataattttctcaggaaaacaatcattcccaaggtccaattccatgcactagtgtctgtatgttagggtgggactgtatcctacactttgacatcttaccttgtttctgacctcctagcctggaggaatattttggtatcctaacagaggtccaccttggtaacatgggtaaccacttcggtttcactccctttctcatcctggtttactgtttgtgacaatgtatccatacctccttccttctgcctcccttcttccctttcttcctttttcctctctgtgaccatatctggcttaggttgagtcctgttaaacaaccagcacgttcatggttccctgtgcacccgccattttgccccttcttttctgtcagttacaggatagcttgttaccttaaatgcaggcacaacagaaagaaaaggaaaacccataaagcagttagggcttcttggtggctcctcacccaggcagctgcttccactgccttctgtggctcttgtggcctcacttacccacctgtcccatacttctcagtcagaagacttcctggtagaaggaacacatggtgttgactttgttggcaggcaagaccagtgtctcccacctgaaaacactcagttcccatatgtacttgttctgctttttctgaggcagttctgcaaagtgtttgattatctatcataatgtatttgtgatacctgctatgggaccacccttagctcaggaacgtctttggagtcttaaaggggccttacttcacttgtgtgtgcaagttcccttgtagacagtgtcagaggtactcaggaacagccaagaggctcactgttactttccttgaacaaaaaggaattggatcttccggggaccggtagctcctagctgcacacaacgcatctcatgacatctgacctaagtttagctgctttgccatgaacgatcctgaagtgatggttctctcagttccaggggtggaaaagcccagctaagggttctgggagagctgggaggaggatggagggtgttgagccagtttgtaggtctgtggataataaggatggacgggacagagggagctgagagtaaggagggaggtgtggaagagagcactgggaggcactgggaggacagacttagggctgcaatggaaattaagatgacacagaaggtgcttagcagagcctggcacgtggaggaagcatttaatcagtgcttggtctcccacaccacagaaagggaaccagagagaagtgtttgttctgatttagtgtggtggaccccatgcctagactagtgtggcacaacttgtgtccttgtgtctcagttagtgtttgttgagagactatataaaagcatcaaagcagaacatccaataaatggatgacaattaaaacagaaattagggtacaagtagaggggcagaagagtctcttagagctggagcctgtcagagaatttcacacgttatgccagggtatggcggatcagtggaatcataggtggataagcaagtaagtgaccaatgcaaaggaattacacccttctcttcctgtgtacattaaaggatatacctgcatctctcaaattaaccagaggttgaagagaagagccagctgttaaagcatggaacaccagagaaaatatgagaaaaggcagagtagtggattgggtgacctttaaaaatcaacttttgcattatcacaaatttgaagaaacaaaatttgaagtgagtgctgaaaacttggctcatgtatcaaaaaacaagaagttttaaatattttaatatttaagcatataaatcaatataaaccttctctatatttaaaaacaattatgtgtatggatgttttacgtggctgtatatctgtgtgccacaggcatgtcttgtgcccagagaggccagaggagagtgttgaatcccctggaactggagttgtagatggtgtgagccaccattgggtgctggaactctgctaattctggaagagcggccagtgctcttagtgaccaaacctttcctccaaccctgccatttctactgtaatagaaaagtcagctcaaggacagatagagatcattcatggaaggattgcacagtggatttacacacggcacaggagaacttgttggccactggagaaatgcagaggaaaggagggagcattcatttgcttatcagctacagtagcaggtcctgccttaagaaagatgcttccctgaattgctggtgggagaaaggctagaaaatgctgttttggcagagtttaaagaggcttaactactacatacttttttttttctttttcttttttttaagataggaagtgccactcttgccactctaaatccagattaaggaaatatctgaaatgcctacaatatgtgcacatatatttatcataaatcatggaaaagttaaaaagaaaaagaaaaaaggtgcccagcaatagggaataataaattgtagaacatatgcatatgcaatattacatgacttttaaaataattttaaagaatattcaaaggagccattcttaacctttattgagtcatgcttgccaatatcccatggcttcacacaagccacacaatcaagtccagaccagcggaatcatgggagtctgctagtacaatccttttctctgtatgctcatagcatgactatagtttttacacatgagacatggacacacttgtatagaagaatatagttgttgttctttaatttattgttaaagtttattataagcattttaaaaataaaatgtatttcttgagctaaaaaggcatggctctgggtttgggacatttagtatgataacaaatatatttaggaggtagtccattttttgatattgttcataaggtaaggtctaggttggttcaagagatatttagctttgattgaatgatgtctaagaagcgggaaagggctgtgggataactttgcttggaaaaatctcatttactatgttgtctttgaggttcctctgaagcactgtagttgaaggcacagaaaacattggaaataatagaaccagagttgagaagagaaaactggagaagaaggtagagagagaaagagggaggaagggagggaaagagggagagagagagagagagagagagagagagagagagagagagagaaagatctattgatcttgactattagagatcattatgagagagatgatagcctggaatagcattggaagtgatgcaaagctggcagaagataaatgttaagataaagtctcaaaaggtacccttagcaggtgggggggggggcaagctgtgctaccaagatttcacaccacataaaagatataatgcaagagctttattagggggagagaggagagcaaaaggctgcctaggaataggggcatgagagagggatagagacagaaagagagggagacagagagacagggagacagaacaaacaagatagtgaggcctttaaaagggggtgcattttacataagaaaatatacaactcagagtgacagtgagaatgcagtggtgttggtggggattcaatgctgttggtggggatgcagtattcttgctgggaatacagtgcagtaggaaatgcagtgttcttgttggaaatgcaatggtatttgtggaaatgcagtggtattggtgggaatgcagtggtgttggtgggaatacagtggtgttgatgggaatgcagtgctctttgtgggaatgcagtggtgttggtgggaatgcagtagtgttggtggaaatgcagtggtgttggtgggaatgcagtgctctttgtggaaatgcagtggtgttggtgcgaatgcagtagtgttggtggaaatgcagtggtgttggtgggaatgcagtggtgttggtggaaatgcagtggtgttggtggaaatgcagtggtgttggtgggaatgcagtgctctttgtggaaatgcagtggtgttggtgcgaatgcagtagtgttggtggaaatgcagtggtgttggtgggaatgcagtggtgttggaggaaatgcagtggtgttggtgggaatgcagtagtgttggtgggaatgcagtagtgttggtgggaatgcagtgctcttggtggggatgcagtgttcttggtggtggttggtgatgtctaagctgctgttgctgggtttctaaaaggcaggctggaggaatgacaaatttacaacaggtcctctgttcactgaagttcaaggccctggcagaagaggtgtcaggtagatgtgtgttctagatgctgctacagtgacaatgttgttgctgccccaaaccctagttagccttatgttattacagcctcagcatcctgcacctctcattcagaccacttgacccacttgtaattccattgacacttgtgtaattagctgatcgatgggcatgttctctaccagactgtcagttccatgggagctgggagtctgtctgattctctgttgttaatcactggtgcctggcacactgctaggcatgtgttttctgggaggatgagtgaacccgagtatatatttaacaagcaaaccggggaggcagtatgattctagaggatccatgaggatggggaggaagactaaagatgttggaatccatgaaaatatctgtagtttcaaagttggaataggctccaagtggtgaccagtgttagtaatgagaaggatgggcttaatgtggtcaagaatgaaaaggctgctcatagagtaaaaacagaagaaacaggtttgagagaaaagaatgtgactgttctgtcaagagcacaatggaccagagaggaaagcgactgcgaagtcctctaccaatgatgagtggggcaagtatgtaagaaggagaaggtgatcctataacaaagtgggtgtcatgcttcatgactgacccactgctttgacctcctcgggctttggcagttgattatttacagtgtccacaagaaatggacatcccgtttggaagtgaagttgagcttgaaaatgaagttgagctgtctcctcttgccccatatctgtgcccagagccactgggtatctttggaagaggctatcagtgcctccagtcctagttgctggtgttgtatgctcatgaaagcctactgtgtacctagtgttgcaccctcatgaggttctcaagtgataagtccttcaaagtatcactcagtctggcagcacccaccccacccttgagtctttgttaggagcaaattctgaagccacacctgggacctacttaagatgatggtctccattcccagagtcctgcactgaaagcatagaccagcagttgccagggactaattagtcctggttgacctttcttcgggagcctctgaattggagtaatgtccccccctactccccactgcctgaaggtgcttttgaagttgtctatttgaaacctgcttttgaattccctaagctaagggaactgggctgataaaattagaggtcctgtcatgtgactgctccattttacagggtcttgtaggttctgctggaatcccaggcagtattccaggcctggctgttatttgcataagtttctgagctagagatggggctcatgggcccccctgaatttggtattttaaattgcagactgaaagaccaaagggaactgaattgcaggctggaggataaggtttcatacccagcagctggaattcatagctctggtgtctgggactcatgcctttgaaggctagtgagaggctgttgcctaacaaaaaccagacctgggcccttgactccagtccccacagcaggtcatctattccctaactgcactctgggtcatcccccacttatacctctcagataaaaacctggcttagcaggacacttgcagttgcttttaatgggccagacctctcagctgcagctctcagcatggagactcagcagcgatgctaattgcaagaatggcaagtggagtgtttttcttttggtaatgcagagagaggttcacagaaatagagaccaggcagattcccatatttaaaaatgactcataaaccagggtgtgcagtttcacagccaaggctctgggtgcacagctggtgctccttggtccccaagcgcatgctcactcatggttggaaagcctattcatgcagtgtttggggtccttgataactgtggtgttggtccatgttctttattgttgaatacagcattgtgggtagatcctaggagcaacggtctcgccccttctgaggctgaggctgaggctgctcctcaatggtgagtactagcaggctagtgcctgcgacatctcttgggaagtaccccttcttctggaacgcctccaggcatgtgtacagaccccaacatgtgtgcactatagtgcattcttcttagcattcttgtgggtaagtctgctattgtcaaagccacagggagggtgtgagcccagccacacattctcctctactcaggattttgagccaataaacaaatctgactaaacactcccgtccagtgagtagactttggttctacttcttttgatggatggaccccatgcaaaactttcgtacagaatatcggtagcttcccccacggtatttgggaatttaaaagcccttaatagcatttttttcatttatccagggacatagatacagttagtaaaaaaaaagggaccagaggcacaaggacacctgccaggctgagagaccctggtgtctactggctgttctgcacatgggtgctgggtgctccagcatagctcacagaggtacaggcagatcgctgggactgccccttgcgctgcccatatgcactggttcacatgaaggagttgagactaggatatgattgaataaatgtgaacttaaactgtgtaacatccttctccatcgtgtcacagataaagagggtttttttaaatttcttcttttaattagatattttcttcatttacatttcaaatgctatcgccaaagtcccctattaccaccaccactatcccccgccctgctccccaacccacacactcccgcttcctggccctggcattcccctgtactgggacatataatcttcgaaaaaccaagggcctctcctcccaatgatggccaactaggccatcttctgctacatatgcagctagagacatgagctctgggggttactggttagttcatattgttgatcctcttatagggttgctgaccgctttagctccttgggtattttctctagctcctccattgggggccctgtgttccatccaatagatgactgtgagcatccacttctgcatttcccgggcactggcattgtctcacaagagacagctatatcagggtcctttcagcaaaatcttgctggcatatgcaatagtgtctgggtttggtggttgtatatgggaaatggagtactactcagctattaaaaacaatgaatttatgaaattcttaggcaaatggctagatctggaggatatcatcctgagtgaggtaacccaatcacaaaagaacacacatgatatatgcactcactgataagtggatagtagcccggataaagagtttttaattattcgactcaagagagtctattgtgatacagtggaatccaattgctagtggattctgaagggaaaatttctagaagttattaaaaaccatggaaactgccatagcccttcacattattctcataggaatttactggtggaagcaagcagtggaagtcatgtagaaagtgtgatgttcaaagcgcctcacccagatgctaattccaacagtgaagaaaatcctgatgtctactaaggcttagttaattattacatggactagtatatttgtaaatactcccaagattatcagttaatgacatggcatgccagttattagtgataatttatattattctatgatattacaaatgatagaaaacagcatggatcatattccaattttatgaaatgtatatggagctcattgattttaaaacctaggctggttagtcagccattgagttctaggacccacctgcctgcctctccactcctacaacagcactagggttagagaaccacacaggcaagtcagccataaaacattaattaattaattaattaatttcacctgttgttccttttaatttaaaaattgttttgttttttgagattataatataataacatcattttctgccttttcattcatccctccaatttccctatatactactccttactctttctttttcaaattcatggctttggcttcttttttttttatcaattgttgttacatatgcttatatatgtgtgtctttataaacatatatccatgaatacataaatgcaacctgctcagtctatggaacgttactcgtgtgtgtgttttcaaggatgactgctattagataagcagttggcgagctttccctggggaaagctatttctcctcttctcaacattctttagttgcttgtatttctttgtatagggttgaggcctcatgggctctccactttagcgtgcctattgttcttattcaactcatgtttagacaggtatgctgatgagacattatgttatagcttctgacattcttagtaaatccagtcacatggcaaactgtctttaagacagatgaaatttgtagaaaacctgcactgaacaaagtattgactacaatgtaatcactttgcatctctgtctttcaaatttctgcattattataataactatgaccagtgatctatgctattactcttgtaattgttttggctgctgtacaactgccatataacagactgagcttcattagaaaacgtggctgggcagtgttggcacacacctttaatcccagtacttcggaggcagaggcaggtggatttctgagtttgaggccagcctggtctacagagtgagttccaggacagccagggctatacagagaaaccctgtctcgaaaaaccaataaaaaaatgtaaatgtctacccacaatggaaagtgtggctcttacagtctacagctctctcttctgcaatgtgcccagacccttaggtgcagcagtgctttgtagctatatctgttgtggctggggtctacaattatagatattgattgactgtggctacattcatctgtggctataagggcaaatacttaggatacagatagagattgtgctggtttggtaaattggtgattgtaggttctccaccaagatccatgggtagttggctaggtttctagtactaggcatgatttctcttttgctgagggaatcttaagaccaatcagagagctgttggttactaccaaaatattagtgccactattgttcctttaatgtgttcgtgctttgctggtcactgtggtgcatggccatcatagctgggtagagctgttggtggtttccctactttggaagcttgcatggtgccttctagaccatgaaagctcgtcgtcagggagggggcttttaggttagttccagctcagggtgccctgggtcctgtgtctgaagggcatgatgtcatcagcagtagggaaaggacttagccttctatgtctgggaaggcaactaagggtaataacaataggctatatgtctggggagtctcttgggcagtcctgactgacaagtaaaaccaggccttcttaagtctagtactggggtttgtgctaaatggtattttgttcttggagggagcattttcagactggataagacaatttcacttaatctatatgtgtacgtttatacacagacttccatgtatactttttatttaaaggaagatagtaacatggctcctcaagacttttcagatctccctgttgttatttttccacctctccttcctctccctgagtagagctcatttgtacccgctattcccctctactgcttcccaactgccccactcagcaaaggtctgtttttgccttcctgacttttgcagttaccttcatatctgaaggtttagagttaggagactcagatgggaaagaacttgtgatgtttgtccttctgggtctgggttacctcaccctatattgtcttttctagttcagtccattttttgtttttaacctgtaaagttaattatttctttatcttcttccttcctttctccttccttccctccttccttccttttatccatccatccttccttccttcctttcttttttctttctttctacatctgaataatattctatagcatccatgcactacattttcattgtctgccagttttctgaagggcagttaggctatttccatttcccagctattgtgaatagagagcatcagtgaacatggctgagcaattatctgtggagttggatgccaagtcctttaggcactgtattcactttcgaaaggtctagaatgtataattaagaccctagtggattaattcccatggagcaggattatgataatgctccttgtttcctctatattttctaagtatttcagaaaagaaaagcattctagaaaacttattcctaaaacctaaataaaagatgtttttgaactgtgacctcatgagccactgcttaaaacaaccctctgaccagagaatctgactggctggtttgcacttacagggagggaggaagctttgctttttgttgatgaagggagactgttgcctctgacaatccagtggtgcatttcatctggtcctaaaggatggacgagcagtatttggatgaggtgaaaggtcagccttcaaagccatatgtattctggaaggaacattagtttgcaagtgcggagtctatgccgtgttatataactttcttactctcagtgtgctctgaaagcagaaagttcctttttccttgcatgtcctgtaagtaaaaaaagaacttccttatactttcttagaaaaataaaatgaagaacaacattcattaaaacattggcaatggactgaaagggccaatagtgagcctagctggggatagagggcatcctgggtgctgggaagcactgagtgaaggctcattttgttttaaagtgcctcgagaagtggttgttcacccactttctgtctgaagacatgatcacatgtaaagctgaacttcagaatgtctttccggcatggatagattgttcacattaattcctgtgtcaaaaacatggtatttgctgtctgaaaatgtgatcagatgtaaatgtgatcagaagtcattccaaacatcagttgatgagctttggacacagtactaaagctgggcaatgacaggaggagggatggtcactttatgtaggttgggaaggacttggatctgtagaagtagaggtcagagccgaggaaggcctggggtgaattctatctttggaggacccgggttcatttggactggagtgaaggatgctgagtggagagctcagtgggtacgtccatcttgagtcatagtcacctgggttaaaaatgaccagcaagggcctcccgggtgctctgcagcttcatctcttccctgttggtggtgacacagggaagaagtttaggatgaagtggaggtactggtgtcctaggccctgagtttggaggaaggtttagctctcgtgaggcatcctggccttatcttttaagtagcccgaatgccagtgtaaacagaagtgtttaggaagcatgcagctcagtgtatgtcagggggaaatgctttctttttcttcctttcaccccaatttagaaattgctgcagattattcttttggtttttcaagacagggcttctctgtgtagccctggctgtcctggaactcactctgtaggccaggctggcctcgaactcgagatccaactgctcttctccagtgctggattaaaggtgtgcaccacagcatccctaaaatagtaaaatttcccctctatttaaggaaagtatttcacgtctcacttttaagtggtgtgatgtttaattcctttccaacatcttatactttaacttctaggattttgttctcattttttttttttttttgttaaagggactttaatttataacaactcccacatacaggcttgatagttttcaacaaacatgtctatttaaaattacaaaaattctgaccctgatctcatgagctatcttatacttagaacatagactacaaatatatatacatatgtatgtgtgtgtgtgtatcttttagtctatgtgtacaaggtcttttttaaactcaagtaaatttcttgtttaaacttaggtccaatccaccagcaccccatttcacacatacacactcacagctatatagatgtatatattccaaatcttaagcattaagataaagattatttaatctgtgcatattttgcccattatttccatacttttaaattttagggataaagaacaaacgtgtgctgactagtcaactttagagaacatatcatagtcattgtactctgagggagtccctaggatggagcccgtaggagcgtgtgtactttgaagtgatttactggtgatggaaggagtattgcagaaatgtcagcttagcaactccacattcataggcctttttcatgtgccagccagtcatttgcaacagtttttttaggaggaaaactttagctttattttgatcaatgtcagctcttgatgtactttccagttataatgaaggtaagaattatgtccatttcaatgcacaaaaatatcattaggtccaatttattgagtacctactatataatgcaagcaaatgacatttcattgaattttcacagcgagcctattaaattagaattattatcctaattttatagagtagaaactgcagtctgaccaaatgccttctataggacaggccttcaccaacctccccatttgccactggccacctgcttctgggtactcagtcactccagctactggctctgcttcagtttttatacattcattatagaaatgttacgtattttataaccttaggccattacagatctgtcacggtctgctcaaggtcctatgacaaaatactgcagagcagatgacttataaacaacaggcattaagctctcctactttagagtctgggaagtccaagataaaagtgctagttaatctgtcatcctgtgaggacctgtatcttagttcatacataatatgatgcctctatttgtgctgtctgtggtaagatgagtaaggctatctgaggcctcgttgatgtgcatacacaatgatggtctcgttacagtaaggtggcttgctgcataggaatagcagagtcatttttggtttcttaagtccaagtaaaaggaatgcttgcattaaaatagagtctgtgagtgtgcgtatttgtagttaaaatacattattgctgaaaacagcatatgctcatttgagcctgcagtgagctgtagtccttccctggggttgcaagggagtcttccctaaatgatactgcatattgatcaagctgttggtggcccctggtcagtagctgtgtttatgacttataacaatgaagcttgttgcctgatttctttctcacaggtttctttctaggctgtcacaatgtttggtaacatcacccattagcagaacctctgaaagttagagacagtcctctcttgtatttaccaactgagttcacagtgacaccgagagacctttgcctcacttaagcgtcttaaggcactgtcatcagctgcaggctccatttcaggagatagtccccacctcttggttaacatgacatcatgggagttcaggcatatctcaagctccactctcctgctctctactgtttcccccacctctccagtctcttcctccactcaagtctcaaaccttttaatcattcatgagggttggaatcaagttctttccaactctccttaacattgatgtcttcacctctcataactttcaaatattcttaatggcatctagaatggtaaatcttttccagcccattcccacgccacactgccatatccattagaggaatctatagcagatcaagtcttataaatgcatcccttaagtaataagccagttgacatgatgccttcagaatgaacagctacgttggcaggcagaaaagcagcattcatcttgttggatatgtctgccagagatcatgggtgattaggtgttttgtgagtgtcccataatatttgaaagggaccttttctgggaagtaagtcataacaatcagctgtagatatttaggaagccatgttgcaagcagatacactgccatctggcctctgctactttgtttactggatgcaggaagatttcagtctcattctcggggacactaggaatttgggaacatgaaatgagcattggcttccactcaaagtcaccaactacgttcagtcctaacaagagatggcctgtctggagtgttctaaagctaggctttgctgtctctggctctgaagtcctgggggcttgtagcagcctgtaccagtggtcttaggggccccgtgtgcttcttgtggctctcaaatcaacacttgctgtgtcacctgctttgtgtcctagacatggccatttccttaagccccaaatttatcttctccagccccctcagctctcttgggggtgggggaggtcacagggttagagcatagggccttgctttggattagacttcaaatctgctctgggggggtttgatctgtccataccactataacatttccctatcaacactgaagctgttttgcttatgtatcctgtctgtgttcaacaaattagcacttttcattttcccaagagccttccctatgctcaccagcataatctaattaattaattaattaaccaattaaagataacaaaatgaaaaaaatctttcctttgcattcacagcctggataattgttaggtgcaggaggcacagcatgcatcctgtgcctccagccttggttcgtgttattttttttttgctaagctagcccatgtctagttttttatttaaaacagtgattctcaacctgtggattgtaacccctttgggtgtcaaatgacccattcataggggtttcctaagaccatcagaaaacacacgtatttgcattatgattcatgacagtagcaaaattgtagttgcaatgaaaatatttttatgcttgggttattaatggtatgtgggtgggtggggggtgattactacaacacgaggaactctattagagggtctcagtgttaggaaggttgagaaccactgatttaaagtgagaggctttaagctctttcttttacgtgggtactcatagatgtctgtaagatgattgactggcctgatttcagtactgttgtgtttaagaggctagggaggctggaggagagggagagagatggggaccagctttcaagcagggtaaacatgcacatttactagttaagctcactgtattatatggtacttgtacggcatccaacaatcacagtcgtaacatagtagatgactggtcatggttattgtaataatgcagaactgtgaagcactatgagaacgagacagagatgcaacgtgattacattcctgtcaatagatgtgcttagtgcatggtttctccatccttccatttgtattaaatacagaatcttcacagcacagtaaaataaggtatacctgtgcaaaggctcgtcctgtcatgcatcatcaaagaacccccaactctatcacattaggatgctgggttttcacatacaaacttaaagggtcacatacatttaatctctagaccttctcactagagagccttgcagctagggtgtagaggcctcataagagccagctgatctcatctcttagctctggcttgaaacttaccgcaatgggaatggctgttagaagcactgaaattggtagccctagagagtgctgctaatgtttcactaacaagcagttccctagcattggaaatggtttttctgctctatagtgatccaccccataatcagcatccaaacgctgacaccattgcatacactagcaagattttatcgaaaggacccagatgtagctgtctcttgtgagactatgccggggcctagcaaacacagaagtggatgcccatagtcagctaatggatggatcacagggctcccaatggaggagctagagaaagtacccaaggagctaaagggatctgcaaccctataggtggaacaacattatgaactaaccagtaccccggagctcttgactctagctgcatatgtatcaaaagatggcctagtctgccatcactggaaagagaggcccattggacacgcaaactttatatgccccagtacaggggaatgccagggccaaaaagggggagtgggtgggtaggggagtgggggtgggtgggtatgggggacttttggtatagcattgaaaagacaccccagtgagtttattctggataggccctctggtcacaggtatgtcagcctttgaacattgcaacacagtgtcatctatagggtccttggttaggagccaatcaattgagctttaaatacagtcacagcagggcatggtagcaggtgccttttatctagcacttgcctttaatccagtacttggaggcagaggcaggcagatctttgagtttaaggccagcctagtctacagagtgagttctaggatggccagagctacacagagaaactgtgtttgggaaaaccaaaagaaaagaagtcacaactcttacaatggaaatccaaaaggggagagtagatgatacctactatgctgcctatctggaacactatgttccctcccaaatagttttctttctttctgctttttgatcttcaggaaagagttaatgactaaagaaagcctcaaagtaacttgagtgcttatacccacctctgtgaatgcttcctatgagcagagcaacattcagagtttacccatgcagtccctgcacagggccacagaagtgtgtgattgacgctctattcccatcttccctggagctcctgaagttcctgaaaccctgcaagcaggaggcagcacaggtcaaactgacttcagttgttggatcttactctctgcaccaccatgaataaaaacttagtggtaaacgcgtttagattcccagagttttgaactgatcaaacattttggaaataaaacaaaaactctctataaaggagatcaaaagagtgctctgtgctatgaagtccccagctgactccaactcaaaatcctttggctttatcaacaccagtgctatgattacatgtattccagcaagcccaactactttatctttgtattgggtaggaagtagaatttttttggtaggcatgattaaggagaggcagcaccgtggaagccctcactcgtgctgggcctgctacttgtcccatggaaccacaactggggatgcatttggtatttatccacatcaaacttgatgaagtcccagacctttgagatatggaatttctagcagtcagagatctatggctatatttccacaccgcctctgttcgcaacttagagataaagacttagcaagtgtgaatcctggccttcttgctctacttcttcccaaaggtctcatacatatctacatggagcctaaataggaaccaaaaaaaagtgagtgatgtttgtagtcattgaaaggccaatctccagggttcccaggacaacccatacaaacagcaagttgcatgtagtaccaatgagcctgctgtttgcaaccattgttcacggaatactgtattttaaaaagtgaaaaatgtacagggcccatcctatactgtgttgctttagaaatatagaaacacaaaacctacaaaccaactataggcatgtattacttagcaacagggacacatttggagaagcaagtcataaggtgatttcattatttggtataggcatcattgaatgctctcatatgggctaagaaggctccaaaagcaaggaaaataaaagcttatgaaaccaccactgcatatttggcccatccttgactatgtgttgtcacatgagacatgattatgcttagtgatgtagaaacaacccaagtaacctttgagcatagtaagcacagacacacacacaaaatctaggaaaggggggcacacagagtgtacgagctgtgagattatgttctctgaatgtgtcaaggaagctgcacccacaaaacctcatgactgtggttacctaagcaagtcctacataataccagtcaatgtgccaagttggatagggggaaattctcaaggctacaccctacatgaagaactacaggcagttagtgactgctgagagagggggaatctgtttccttcagagtcagaatatctagtcccaagtggccagccctaaactcatgttcatatgaatagcactaagtgatctcagtaggttttacatgcgtattcttgtgtaacattaataaccaaagaagaggtcatgaatttgacagggagtgggggtaacaggaggagttgaagggggagagaagaaagggtaaaaacaatacaactatagtagtatccaacggatgtgtgcagtgtcagagggcaactttgtggaatcagatctttcccaccacctttgaatgggttctggtgatcgaacccaaatggacatactttatagcaggcacctttcctcactaagccatatggctgccagccctaaacccggttcctaagatgaaaagaaaaaatattttcagatatgaaagcgtgacgaaggggagtatagatttggatgagggggttgttctagtatggttcttggcttaacatttggaaataggagtagatcgagtcgatttctaagaaaaggtaatgaaaccaagcagttgaaaacctgaaaatggaacagaaactccaggggctgtccttaaatattgtcctttcccaggttgttttgtgggctcttcaagggcagtgactacaggctgaattgcatgtagattcttccagacctgacatgcgcagtagcactcagcttcagtggggaaggctgagatgccagcatgcttgttggtagtgacaaaggatgtgtttgaggaaagcaggtcctgtgtcttccctcagaagccagtgcagggcagaggctgacacccctttttccagtctgcctatgacattcatgacctcttctgaaaactggagaccacagggagctttcttcatgaccttgttcatgtggagcctactctgaaggaggagggggaaatgtttgagcagctgggctgaccccattcctggccttgattttgttcaacttcctaagggacattgaatagttgtcctggcctgtggccaccatgctgggctgtggttacaccttccctgccttccttctcttgcccttgctaggggcttcctgctgctcccctctgctacagatatggctcgtgctcctccaggattctggagttaacatgacagatgtactgggattacagtttgccttcctgggatctccatagggtttggcatgggctcctaaaatggagagtctccacactcttcattttccttgtaaaggagattgtgggaatgttgtattataatgcaagactgccccgggttctctttggaactctccagaacctttgtattctgctgtactagacaaatggtgatcacatactctgagcaaaactgataggatttaatcaaggatggggctgagcatggggctcactcttgtcatccagcacttgggaggctgaggcatggtgattgccacagcaagtatgagactacacaggataacatatcctaggctacagagtgaaatcctacctaaaaacaaatcaaacaataacagcaacaaaacaaaataaaacaaatgaaaaaaattaaaataaacacaaaagaatgtacagagttattggccagatggaccagaaaaatataatggcgggtttattagatgctttcctgggtgggttcactggtcccaaggagcaaggccaggggaattgtacacccgtgctaaggaaaggggatttataggtgttaggcgagaggtgatgtgttagctcagagctggggttgtgcccatataaggtcaaaagctgaacccctgggcaggcactcttgtatgggttgcctgaaatgcagaagtgagtggtgatgatgtattagctctgagttttctctgtaggggtggggttaagggaaggagagcagacagggttccccagcctggggggagttgggggcagcaagcaggggtgccaaccaaacacagagccgtgagctctaatcttgcacaaagctggctgtatgaggagaagagagatcatatcttttgcctagattttaacatcaagatttcttcttcttacctcctgtctacttctgacccactaaactgtggtatccaccatccctggggtctctcttgctctgggtatcagccattgttctccaaagtgtggccttggctttaggctctatatcttctttccactttccttgaagtcctcctgctctccaaaacaagtttttggtttttttgtttttgtttgttttggtgttgttttgactagttcccatgttgtagcccacactcacatcttaggactcattatcctactgtgtaacaccagctaacccagagacagcattccttttactatgtagcaccagctagcccagagacagcattccacttgtcccatcctcccagatgctgggattttcatcaacactgtatactgaatttctttctgtctcttattggctatggcttagggatctggagagatagcccactagttaagattacttactgctcttgcagaggacctgggtttgattcccagcatcgacattgaaccttgtaattgcctgtaactttagttccagaggatctgacacctcttcagacctccttgggctcctgtatacacatatgtcacgcacagacacactctaacacacacacatacacataaaagaaattaatatgaaaatagttatggcttagaacatctgctgttggctattctctgtgtttagcctcctgaggaagttaccttctttgacaccatctctctatcctattgtccaattctagattccagaacttgctgaggtaaagtcagttactgtctttctcatactgcattcaaaggtctcaagacttaagtgtcagatacaattcaccaatctccatctccattgtcctcccaaatgacatgttccctccagttcccagtcttagcactgaggtgaggtttctcatacccaaccatttctcattcaaaaaaattccactgagatggtgcatactcaggaggctatggcaggagaatcaaaaattcaagccagcctaggttacataatgagaccctgtttcaaataaaacagcaacagaaggagcctcttagctttgtctggtatccttcagtgggttgtgtagcatgtgctcaccaaggggtggatgtcattatctggtttgttcatcagatgtagtgctttaaggcaaaggctccccttgcttctcagtgtctcccagtagtgccttgtctgtaaagcaggattaagtgttttgttcatgtgatgatatgtatgtcgttatgtgacactcatggatttatcagataccatcctatcccatgcactgtggttcttaatagtcttccttttactagggtataatctccatgaacgtttgcctggctgtagagttgggagttttcctttaagtgtgttataacccttatacaacctttacactgcagtcttagggagcattgtagaagagggagcagaaggagtgtaagattcagagaaccagagtgtctgctgcaagatagcttcagatatgttggacaggaagctccggccctgaaatctctgcaaaacttaaacaagaacaacgcaatgttaacaccagctgtcatgcaattgggaggactcacaatatgccacccctagatagagggctatgtgaaattaatggctgatgtgtgtgtgtgtgtgtgtgagagagagagagagagagagagagagagagagagaggatcagtctcagtctctctcccccagatattccaatcccaagtggtcagccctaaacacatacacatatgagcaacactcaatgaactcatcctgtgtttctattgtgtgtgtgtgtgtgtgtgtgtgtgtgtgtgtgtgtgtgtgtgtaacaataataaagaagagttcatgagtctgaaagagaattggggagtttggaaggaggggaggagggaaggatagaagtgatgtaaatacactaatcatgtatggaattctcccaaaaaaaaaaaaaaaaaaaaaaaagacctatagagtgttcttgtccatgtcctcaggggctactgaagtctgctgcatttgtagctctgagctacccagattgccgctggcctctggctttcctctgatgcggtggtactagtcttcaccacgggagagtgaactctgcacagcctctcctagtcctcttagagacttcactgtggcagctgtcactcttggaaaaaagacagtgctctacagcacattgccctcttatgtggcagaacttaactgtgtgtattctagatgcttccaagaattgcttgtgctctaacctggccattgatattctttctgaatcaaatcagtgctggtagctgatgtttgtgctttcctgctcttctttaagtggggtacaggaaaaggaaggactgttcatagcagtgttcatctgcctgggctctgaagctcttagagaatgctgattaggtaccaggcttcccgaagaacgtgctcttgagaccctgatccacactggcatgtgggagagtctaaatatcacacactcctgtcttcgggcatgtgtgactaagcagcacttttgttccttacagcccttgagggcagggacattattgtgttcacgtggatcccccaccccaagtatctacagctggatacatggctgtttgtgaagtagcaggaggaaggagggacagaagatggggcggaattgaaaacaacataccagatgatcttccagagtaggaatttagatggtatcagatggaagatttggtaaataggttttctgctcctagatatgcatgaaattgctccccagggtgtacccggtgtgttagaagattggatatcattagtactggtaaaaatagccacgtcttgaggagcacccaacattagaaatagcagtgggatagcatataatgggacatctgaggacacagagcctgtaggtctcagggggaagagtcctggcttgctgaagggccctatgcatcaagccctggaacagccacctgacttgctccgattttggggtgcagactgtctggattgaggggctcatcaccatcatttcctggatcccagagaccctttcatcttgagtctaggttttaaatgtgagaatttctgtcttttcttctgccctttctcaatgacactggggctgctatttgtttcagagcagatgctgagtgggtttgaacttgctatcatctgtactacagtagattgtttatggtttgctagggtgttgagaaggattctaaagtttagtttaggttcagtggagggaagttccttgaaaagaggtggcaagggcagggatggctggagaggagccatgtgggtgccacccctgttctagagagtggggagcagtagcctagcgttggtgggggtgattttcatttcatttccccccagagctttcctttggtgctcttaagtgggttcaatgtggtatctttgtagaaggagataaaaaaaagttcggagacttcccagcttccacatctaacttggtatctgatgttggaccctagaccctgtgatcacaaacaggcaggaacaggaggctatgtaacacccccctccagagggaatgtttcccagtagttatttcagaggcaatttaagcttttgtaacttgagctgtgactggtactcccaacttagcacataaaattgttgctcacatggctagaatcttggctttgtgcattggcagtcagaatggctgaggagggaccaatggcttcgagccacctcagggtgtatttcattaacagtcagttatacagccatgtttagtggcttttgcccagggtgaatttgtccaggtacttcctttaaggcattgtctttttcatgtggagaaacagaggcatgactggaatgtatgaattttcaaagtaacttgggcctagggcctcttgggccatgaagttagcagattttttttttgaatgttttacacatgtcttctgtagacgttgcaagggtaactatgagcaacaacatgtgagcccctcagccttaaagtgtttcagtatttggagaagataaatggaagtaccacagcaaataatactttaaaaagagtggtaagcatcctgaaggaaacagaaaccctccacggtggttgaccagagaagctccttggagatagtccaaagagtcactaggtctgagaagcagctgaagcaaatctgtggaggatggaagagaagtcagggctagtggagagatgccctgaggcagtctattagcacccatattgtggatggagatagtagtgggcttattatagactcaaaggcatcagttgcttctcttagaggttacaggcttcagtcattgggttcagtcaaggctccaggccctaactagaagctgcaacagtgtccactcctccagcgtctttgggtattttctcctggcaaggctattttggtctctttaggaagccttctgtggtgtctgtgaaaccaggattcccttagaatctctgtttatgcgctcagaacagttcaccttatagtctaacttcattgtggcttctaagcagactggaactctgcacatgttctcatgcacacagtgcctgatgagcaatatataatgtttacacttcgaccattattacagaaagatcgtgagtgaaggttaatactgagtatgagtaattgttgacttctatattcctcagaatttagtctttgcatgaaacagtgatcagtcactgtaaggacgctgtgtgctaacaaactatgtgtagccaaagttaccattgtgaccaatggtaagcacgcatttgctgttgtaagcacatttgcagtgatgtgtcaccaccaccatctaactccaaactggactttcatacaagaaaaagccattccagttaaactgtagctccccatacccctccagacccaggaaagaaacactcgtctttctgtctttatcaacttggctattcttgctacctcatgtaagtgaaatcagccagtctatctttatgtcatgacttatttcactgagcatttcaaggtgcatctgtgatctctattgtatatataacacaatagcttttttccttttaaggagggatacacacacatgcacatacatacagacatacacatatatacatgcacacatgcacacagacacacagacacacacttagacattgaaacacagacatagacacacaaacacacagacacacatgcacatacacagacctagacacacacacagacactcagatttgtacatatgcacagacatgcatagatacacacacacaaaaacacatgcacacatgtacatacatacacacatagacatacacagttacacagacacatatacacactcacacatacaagcatactgacacacaggcatagacacagaaatgcacatgtacacacacacacacacacacacacacactccactttgtgtttgtctatttatctgctggtgcatattcgggttgtttccatctttgggttataaggactatcgtgaacacgatgtgcaaattcctttttaagtcccaactttcaacttctactgaaaatagtagtgccgaatcttgtggtaaagctacttttagactttagaaacattttaaatatatttgggacagtcagtttacatcaaacaaagtcaccttccggtaggaggtgacatgggctgagattttgcattcttctttttcgacccgtgtgatgatgcttgctgacatgaaatgactcgttttaaagatgcctttattttattttttacagcatcaaacttctagctgtgcaagagctgcttgacaaagaggccctggaaaaggtaaatattttgtttttcctgctacacggaagaattctgctccctgaccagaggcagcacttactgcagacgcagtctgcttcttcctattctcctcctgccctgagccctgcagactttcagtcagagctcctagtactcacactgcacttacccttgcagacccaagctcgctctgttcattccaggctctgggaaagccgaggcttgctcatcacaagccgggccacactctgtagaagggttcctgcgcttctaagctgcaggagcaagaggcctcccgtatgccaggcttcaagcttgctgtctcctcttggtttcacattcgatcgtctgagtatagagatgaagggactgaggtccagctatacttggtcaccagcccaaggcaaatggactcagtggaagagtgaagatgtagacttctttaaaagatgtgaccgtggcagtgttcttttagtggtctagctattgtagtatattatagtataattaggctgtgctgaagacagggaaatcacctccacacctgtgctttgggagtttgggcgacatctggtgcattttgccatgttcaagtcaactggaactgacaatcttttacttgtagatcctggttctgggtttaaagaggaatgggcttagcaatgcaggctaggccagtactgaggaggccaggccctaaatgccattgtgggagctattgaactcctgcagtacattcccctcggctagctcaggactcttcctacacatgtcgttgcagacattgattataatctataggttgacataaatgtaagttgttagagagataaacatccaatggtacttttttttaaggaacataaaatgtttggaccagtgctgagtgtctaggtactataacgaaggaagtctttaaagtcagtatcaagcagtgctgtgaagggtagggagtggcctgagctttgagactccattcagcctcttttccatgaggggtgatacaaggacactggttccattggaccttagaatggcaagatgtgaggcaaataagttaatgtagccaaatggctctctagatatgaaagcactctgcccatatcaaggcttaattattcatgtaaatgtttcatacacatccagctattaaaacatgctatgatgactataaaagctatcagtgggacaaatgacagccttgagggtggatggcagattagataatggtactaaagtagccataacttttccagaagctgatggctttttttgtgatcatgtaagagnnnnnnnnnnnnnnnnnnnnnnnnnnnnnnnnnnnnnnnnnnnnnnnnnnnnnnnnnnnnnnnnnnnnnnnnnnnnnnnnnnnnnnnnnnnnnnnnnnnnnnnnnnnnnnnnnnnnnnnnnnnnnnnnnnnnnnnnnnnnnnnnnnnnnnnnnnnnnnnnnnnnnnnnnnnnnnnnnnnnnnnnnnnnnnnnnnnnnnnnnnnnnnnnnnnnnnnnnnnnnnnnnnnnnnnnnnnnnnnnnnnnnnnnnnnnnnnnnnnnnnnnnnnnnnnnnnnnnnnnnnnnnnnnnnnnnnnnnnnnnnnnnnnnnnnnnnnnnnnnnnnnnnnnnnnnnnnnnnnnnnnnnnnnnnnnnnnnnnnnnnnnnnnnnnnnnnnnnnnnnnnnnnnnnnnnnnnnnnnnnnnnnnnnnnnnnnnnnnnnnnnnnnnnnnnnnnnnnnnnnnnnnnnnnnnnnnnnnnnnnnnnnnnnnnnnnnnnnnnnnnnnnnnnnnnnnnnnnnnnnnnnnnnnnnnnnnnnnnnnnnttgtagtagtattcactaaacctgtgtatttcacttcctggttttgaaaaagaaaaaaaatcttcgcacacacggtgcttccacatccagtgcatcagtataataaaaatacaggcagcaaaaataccagttatgtctttgaagtggttactgtccaatttagagaggccacatagccagaccaattcagggcaccagagcttgcaaaatggatcagagaggtagtattgggcttgcagtggctggctgccagccagtgagccattgtgccaccctgagaaccaagctttcatggctctgctccaaaacctgccttctccttcctccttgaattatcttgggttacttatcttctgtgcctcaggtttccagctgaaaaatgaaagtcataatccttaattcacaaagctttagaagagagttaagtgggctgtctagggaaaggtgctcagtaggacatctgggtctcggtgatctccagaagttagcttctctgtatactgttcccttgtccccatccacctccagcttccctcctcttcctcccaccatccgtcttcccttcttgtaagcctgatggtgggtttgcatcatcccatcttgacagatagggccgtcgaagtatatgcagggactgatggggagccacggtcttgcagttcctcttctctcttctgtgcagttgtctcctcgttccctcattcattctgcaagtgtgggggttttctgcatgttaggcaagtaataaacattcttagaactgctcagaaacagcccagtggttagcgctcggtatccagttgttatatgttgagtgaatcatgacatattgcctagattggtatggttttttgtttttgtagtaagattggttcagtgatttgttgatatgtaagatatgttccctgaagagcctcatggatcatatttttccttccacgtggaaagaaaaggctagaaagccactgagaaaagtgtgtggtaaacccagctttgccattcagcattgtcactgggccactagctctggaagctcattaggaatgcagaactttgacctttagctcagacccactgaatcagagccactcgctgcatctgagagcccaggtgactgactagtgcgcattaaagtccaagaactgctcaggagagggttgtttaccatcccgcagtgactattgactagcctgtaatagtcagaaacctattcgattgcacaaattgtgcttctatgtccagtgaagctccttcgggagctgtgtgttctatttgtagatttctctttgggtgtggcatccttgcgagtttacaagcacacatacttgtttagaaggcagagcagaattggggaggggactttattgctatctgccttactgccttgagacagaggctctcatggaatcagagccttgcagtttctgcttgtctggccagttagccattgagcttctgggatttgcctgtctttgctatagggctgcggtcacagatatgagcaaccatgcctgatgtcttagttagggttttattgctgtgaatagatgctatgaccatggcaactcttataaaggaaaatatttaattgggcctggctcaccagttcagaggtttagtccattattgtcataaggggatgcatggcacatgcaggcagacatagtactggagagagagttgagagttcaatatctggatccataagcagcaggaagagagagcctggtttcagtttctgaaacctcagagactactcccaaagacatactcttacaacaaggcctcactgctaataatgcccttccctctgagtctatgggggccattttcattcagagcaccacacctgacctttttatgtggatgaactttttatgtggaggacctggtttgaactcaggtcctcatgcttgcaaagcaagcactcttacccagcctcttgaagcctcatttatatctcacttttcctgctagtaatagtcagagccaacagagaggtctcagaagtgcagattgaaagcttcacacgcctatcaccctgctgatgtggcatggaaacctgcctttggagtttatagtcacagaatttctgaaactttaccatgttggaaactgtgtcttcagttttttttttttgtttgtttgtttgtttgtttttttcgagacagggtttgtctgtgtagccctggctatcctggaactctgtagaccaggctggcctcaattaaatgtgtgcgccaccacgcccgccttcttcagtcttaacagtaggagcctgtgcggacctccatcttggaaggtggttgtaattctaaaagtccttttctcttacacaggggctggcaatagatctgaatagtaaaggtttgagttgcacaaaacacaacatgaaaggttggcagtgtctggaggtcgtagaaaaggagatttccaatgtcctctcctttacagtcagccacagttagcatagtcttagtattttagctgaggttttcctgttatgtacagccaagagctggggcatcttccagccacactatgtctccctgtgacttggaggctggcagaacatcatcctggaggcctgggtttccttccttacttctgatcttgttctccatgctgcctccttatgtacacccgatagctatgctcatcagagctgaaccctggccacactgttgctgggggttgtttttttcttttaccctgcattctattttctccactttcctcagtgctccttactagtttgaggctcttgtgaattatctgtcctattcaacatcagaattggcattctgatagaggaattgtgaacagcggtggcatcaatggataaacttccaagcttcctattttgactttttaaagcctctccccgctgtgtttggtttggctttctggagtcatgtgtagcattagctggcctggaactactgtatacactgtacttggatgtgcagtggtccttctgcctctgcctactcagtgctgggatttcaggcctatgtcacagcctcaagttagggagaaactgtggctctgggtttttcttttttatttatttctcacaaatactacacaaggcccagtttctggattagacacagcaatttgtcagttattttaaaaataagtaacaaaccataaaattatcaatctaagttttcttatgcagtttttattagaaatatatttgccataacatttatgcagaatgcctggtgcagactcatgcaggccctgtgcttgctacttaagtctctgtgagcccataggagacctgcttagttgattcagtgtgccatgttctcctggtgtccttgacctggtgactcctacagtctttcctcacactctttggcacagttcccagatctctgaggggaggaaacctgatagggacctccagtttagactcttcatcagcgtaatgtctggctgtgggtctctatctgctcctgtctgcacccagaggaagactctgacagtgactggacaaggcacctatcctaggtctctgagctatccagtctctaggtcctgaccatgcagacagtatagggcatgggttccctctcctggcatgaacctcaagttgtataagatatctggttggccactcccacgagttctgcaccaccattgcctcaacacatcttgcaggcaggaaagattgtagggttgcaggaaagattgtagggttttgtggctgggttagtgtccaggtttctctttccatagtgcatgagtaccttcttgtgacagagactagaatgcagtggtgaaggatccttgagggcatcagctcaatctctctatgttcagtgagctggatggatgcagcctccactgtcagtcttttgagagcaaccctctgtcctagcatcagcctgggttgtttagggatctctatgggaccacctcagccaacaactcaacagaatacaactcagtcccacccctggctataaaagatggccatagcctccattactaggaatcctcactaagattaccctcattgatcccatgaagtttctactgcactgacttttcataccatacccccaaattctccccaattccagctgtctcttcccacactctttccttcaactccttccctacattatccctcccactaccatcacgacctgcccccagtccacttgcacattctattctgtttcctattcctggggaaatctatgcgatcctctagagaccttctcttacctaacatctctgagtctgtggattgactattattccttaacagctagtatccacatccattatgactggtggcttgatatttctgtgagactcctaacagaggagtgagtggtgtgtctctgacccttttgcctgttcttgggactctttttcctcctattgggttgccttgttcataaaggctttctgccttgtcttattgtatgttgttttgttgtttttggttttcatctcttggaggctggatctgggggagagaagaggtgtaggggagaactgggaggagcggaggatggagaaactgtggtcaggatgaattataggagagaagaatctcttttcaatacaaaaagaaatagttgaaagacttgtaaggttaaaaaaagttcagagaaagaattatggaacaagaaataaataaataaataagtgaaaaattgtgggagatacacataaagaacttctctgtcaatatttttttctgagcttaatatatcctctaagtcttctctgctaacccaaagttagacttgtctccatcgacttcttattagaagaatattattagaaccatgatcagggtatctaatatgtataagtatcaaggcccgtgacatttttctgaaacaatatttatgtgtgcatgcatgtgtgtgtgtgtgtgtgtgtgtgtgtgcacgcgcgcatttcctgccacacaatgcttagctcccaagcacagtgagaaccatgcttaccagttgcccgtctgtgctctttgcttttcgagtaggatcttctgttttcctgaactcaagtcactaagactggtttcctaggatttaaaaacagactcatctaatgagtttaaatgtggcattacatgaaaggaaataaaaatattgttacagcttgatttagaaagatctatttttcttccccctaatggtcctttccaacagcttcctgcaaggctgcagacagtactgtggccagccattctggctcgagatcaccttcaccctgccagaacagagggcagccatgagctgaccttactgtcatcaatgcccacctgtgagctcagcctcccaggccacccaactcacaactgttgcctgttctgtaccctcggctgtcactcattcatcaatctcaggtcagctgatctgctatgatatcacactcagttttttagagctgagcttcaagggcgtagacaggttgagtccagcttgcttattattatcagtgagaggcctcctgagcaggttacccacaatcttagcgtctcctatcccccaaccccagcacgcagggttacaattgtaactacgtcatcggaattttgtgagaactaaagggaatgacgtatgcagcaatagagatcatatattagtaaatgccagtgtgccagtgtctaccctacgctgtcagtgagctgctgttctatcattgtcacattcatcatccttatcagccgtgccgtctcttcctctcttgagaagcttaaggtgagctttaccactgccattagaagatgttaaagggaaagccataactttcccctgcctccatttgccaaacctggacaggaagataaccggtcctcctccctgccgctgctgccgccatgaagtgtttctcttaaaatactgactttgaaatgcaactctttgtctggttttctggtaggtggaacacatgatctctaagccctgctttggtgttttctatgtgtgacaagtatatattcgttttaccaggaagcctggggttaggaaaattaaacttaatacagtagtcactcttccagccagaacctagtgctaagcagcattggaattagaagagaatcgttccccagagatcttcaggaggaataggagacaaacagtttttatatagatgcgggtgactaagccaaggatgttagcttggctcctgacagtaattgggagtcgtgtttcaaattcacggaaatgcacatagatagtggcttctgttgtgatctggatttgcagttaatttagctttcgtgagtgcagtggctgctctgtttttgaattgtactttataccaaagatggtaaagttataaaactttacccttgaatggtctgtgtagaaccacaatgtttcaactgagggagacttttcctacacatttttaagaaagtacactgagaccaaggttattgaggcacccttctctcccgggccataactggcttattagtcaggcaaaggacatttccacctagtgtcttggcttccatatccagatggtcacagaactgtaaagaatgtatagaataataaagcaccttgagtagacatgccctgcatttgggctaaaatattttctagaaaacatatcctttaaaaacatcagatgagatccttcggatcttctgtgttatctttcctctttagcttatttcctcattagttggagcttaatgtgaaggccacctttcgaggttggtagtcacagtctatgaaggttgtttgttttctcgctgtgttgagcagagctgtgtgtggtcataattaatctcactgccaccctttgcctggcaggaagatgcccacactaaaaggacggtgagcagaaatggggctcccattggagtttacagtctcctgagtgcagctctgagggaggcagctccactttccagactgctccctgggttctacccacaaaccttatggctgggtactggagtatcttggtgaattgtaggctaggctccatcgtctctttaaaggaggtggtactgggtttgtaactccagggtagactgcttgactatagcatgcataaggtctagctttaatccccagtagcagcaaaagaatgggagtaaatatctgatttctcctgatgttttgacatccccacaagataccatgtatatactcaggggctcacactgtcctatcgtttccccatgtggagcttttaaaatctctttagctttattagttatcaaaggtaagcatgtacagagtgagaggttattttaaattggtcatattagcaagaaaccatagtatgtaaagttgaagttgctagaagcagcatgctggtcatatctgtggagggcaggtgacaggaggctgaccctcaaacacataatgggcttcattagtctcagagatgccccgactctttggctagggcctgttcctgggaatgtctcctaatggaacagtccatgaagatagataacaaacacattgatacatgctttgcaatggtgcacaaatggaaggcagatcattgtcatagagaattgctagcttttagaaaggactgtggtaggtctgcagtcatgggtatgtgactaccataaatggggaaacgtttagcctggtaggaatgtgatatgctttttattgaaaaggaaatttacttctgcttgctttgataacaactatgtgtaaatatattttttgttttctaagctgatgtttcctgagccccatctcctattagacattgtgctagtgggtgtttgcatctgtgaacaggacattttcctttccctacctcaggaagctcactctgttgcaggcaaggggaccaccatttcctgttacacagttatttaattacaatagtataatgaaaaaagaaaaaaaaaaactcaaaacaaatcagaaaaagcaggttgtcaggaagggggccctaacctagtgcttttattgcatccaggaaatatgggaaacgtaatttaggaaggctcttattttcctttatcattgaggtaatattcctggattaaacattttaagacctctttggctgctacagtgtggcgggggcaggaggaaggagctccatggtctctgcagggtggggtggtacagagatggaacagcttggcatcccgtacacagtgggtcctggtagaacacagcagcatgttgccaattggtggcttaaatctggcccatggctcttctttgtgaggtaccattggatacagggatacccaccatttcatttcctgcctgtggctgctctcatgccacaaggacagagtccagtggttgtaatagagatagtctatctggcagacctcaagttatctatgagttggctctctttatttgctgtttgctgactcatcttctagagaagtagtatcttttaagaatcacatgggatgccaggcagtggtggtgcatgcctttaatcccagcccttgggaggcagaggcaggtggatttctgagttcgaggacagcctggtctacagagtgagttctgggacagccagggctatacagagaaaccctgtctcgaaaaacaagaacaagaacaagaacaacaacaacaacaaaagagtcacatgggaactacatacacttatctcagaaaaattcatgtatgaacattttgtacatggttgccttcccttatttcaggagcctatgcggcacctcaaggtcttactactggtgaaggtaggattcatttcttccctctaggtatgtccaatcatttcttctttgaggttttaattgtgggatgaatttgccaaaggccatggagcacagtgcttaggtcaaggagaaagattctgtggttagatctggtcagattttgtatactgtatcctgctggtcccaaaacatcatcccttcagttctttctgtgacttatagacactcgcacagtggggactttaaggggatatctggctcctatagtgtccatgcccccattcttagccacatcagacatatttaggtctcctgaaacctaaagtgggctgagacttgacctgctttctcctttgcctctgccctgtttctcttggttggtacttactcagataaaagtcttagtcacatagccaggcttcatcgccttcagcattctttggaacttaggagtgtggcccttgtctaataaacatggcaatctaatacattaccatagacagcttctttctaagcacttttaactatagaggatttctctttggggccagagagtaaggatgcttccagccaagcctgatgaccagagatcagttcctggtgctctctagtagaaagagcgaactgattcctggaagttgttctctgacttccataagtgtgtaagtggatacaatactctctctctctcaaataaaaatcttactttttattattatagattattgttaaattattacattaaagtttttgaatgtaattaatttttggataatttttgttcacatatattttgatattgaaaatacattgatttaggcttgaaatatcttttaattttgagggtataaccatatggtctttctatgcctgtcacagctgtgaatataaagacatatttattaattttaggtttaggccttatagcttaggcttgttcccacctagctcataacttaaattatcccatatatattaatctatgttctaccacatggctcattggttatctctccttcactcctggcctgcttctttctctgcatctggcaggcaaatcgtccacatttgattcgttccctatctctgccagaagtcctgcctattctctcctcctttgctgccagtcttttattaaaccaatcagcaggtgagagagagtgtgtttacaaaataacgatctattcaaggctaacttcctcctttctgttctattagatttagtgtatctggttttatgttgaggtttttgatccacttggacttgagttttgtgcagggtaatagatatggatctatttgcattcttctacatgtagccatccagttagaccagcaccaatttgtttaagatgctctcccttttctactgaatcttgtcttcatgctggtcccccaacaacagcaggggctgtccctaaatctgatgcctgtctatggattcagttcccctaactgggctgccttgtctggtctcagtgggagaggatgcgcctagtcctgcagtgacttgatggggtgggaggagtcatatgtcactggatcgatctttgaaaaatgtttgaagttatagaagtatgaattgacaagaaaaggacataagtcacccttggagcaagtgtggccggtcagctgagcaggagtttcatggtggccatcttctgcctttctgactgtattttgaggctactcctctgatggttaattgggtttcccgaatactcctaatgttccattgttcatattagtcttctagttaactctagacttacagaggaaatgaacagagattgtatacatatgggtcactgatgtatccagagctcacagctgtgtctatttaaaaaaaaatagcaacagaggctagttcagtcgtgcctcaagatcagaggagctttggcccattggacattgttgaagtctaaatgtgcacaggagagctagctttcctttggcctagagaagtcagtcctctgtgtttcactaagacttttttccccacccacctaaaagagttttgctggcctgtcagggtggcattcctaggtcatgagctggccacaacttttttttgttgctgccttgcccaccctgagatgtctcccctgtctctgctatttgcagtctccacttatgatcatggttgtgtaccttatatcagaataaccttccctcagctaacaatataaactgggtaagatacactcaagtattgtgaggccccaaagggcagctaaaataggcagatactgcgggagctacaagagaggcgggaatgagcaccaagtaaggtcggtttccctgtgacttattctagctctctactctgtgggcagctagtctgtgggcagccagcttcccagcagatgctggaagtgtacaggggaataagaacattttgcatgagtttgggactcccgattttctctgttgttttctgtcttctgatgttactgctttcttctccctcttttgatttagcttatttttcttggaggcttagattcttcatttgaactcattcttctctgctggtataaaaaggcccctgattgtaaactgatctctaatattgctgtagacagttccttccactttggcacattgcctttccagtttatccgtgccaaggtcttcacattcccttatgatttcccgtttaatcttttggtatgtctaagtgaattgtataatttccacacatctataaattctccaaacttatttttcttaccgatttctcatttcattccaccttgtcgtagtcagggaacgtgtttttttttttttttttttacttttatctttgtaaatgtgttgatccatggttcctagccccgtatatggtttgtccggagagctcctgtgtgccaagtggaaggtgtgtatttctagatgcttggagtgactgtaggctttgttgattcatgtttctgaattatgttatgttcttgtcaatcacctgtctacttaaaccatccatttaactattgttggtgaattacctattcctttaattctgtcagttcttgggtcaagtatttgtggttatgttattaggcttacaatgatcatatcattccaatcccgtgaaccttttataatatattgtcctttcatcatgtctaatttttagtaattttttttaaagttacattttttttcctttcttttctttctttttttcttttctttctttttctttttttttttctttttccttttcttttgacaggatttctcagtcctggctgtctaggaactctctctgcagactaggctggtccctaactcagagacctgcctgcctctgcatcctgagtgctgggctgtgtgcaccaccacacccagctgcagttcatttttctgaccttagcgtagttccttcttgcatcatatctactctttcccctttgggtttcagttgccactctcagatcctacagatagttgaagcttattttttatacagccctattgttcctagtgttttatgcatctgggcttatgttgtgaaggctgtcattgaaggggaggctaccatttcacctgtggttttctcttctttactctttgttgttgatcctgactgctctgctcttaggtattaagcaaatctttttttctatcatttgtttatttttttcctatttactgattttttttttgagacagggtcttattatgcagcccagactagccttgaacttggagcaatcctcccatatcaaaggattataataagccaccacatccagctttaagtaaatatgtcgcattgttgttttttaaaattctttctttacatatactcttattttttttagcagtttcatgatttatcatggtatcctaatttataaggtcacactaactgcattcaaatttttattgtctcatacttatgctaccaatccccataagcgataggcacatctgtgcgccagaactccatcctctcctctccctttcacactagtgttatacacatcaatacatattttgcagccagactgtgcatggttgtaattcatattcatatatatatatatatatacatatatatatatatatatatatatgtgtgtgtgtgtgtgtgtgtgtgtgtgtgtgtgtgtgtgtcttttaaaggatgcaagagatagagcaagtatttacttgtagattagctgtgagaatcctaccttacagtcacacctcattttttgtgcctgtggatttgagttactacttagtgtggttccttattccagaacatcattatttatttctagctcctttctactttatttcattttttaaaatggtgtaggcattacaatataattatatgtatgttcttttatacagcccgtcacctccacacaccataactctggtattgaaaccatgaccttgtagatgctgagtgctctgttcagctgagacacactaccccagtcgctgcaatcgcttcttaaatgagctaatgaaagggtagaaataggctcccataacagcaactacatttgcatttacaggtggtgcttgtttttgttttgttttgtttttttggttttcgagacagggtttctctgtgtagccctggctgtcctggagctcactttgtagaccaggctggcctcgaactcagaaatccgcctgcctctgcctcccaagtgctgggattaaaggcgtgtgccaccactgcccggctgttttttttttttttttaattaaggtctctggttaatgtgagatcatttgcctttagcctaaatgtcatatttttcaattattaaaatatagatatatcatttttccctttccctttcccccatccaatttctctcatttccctcttttttaaatttatggcttctttttctttattattgtttatacacacacattcacacataaatgcataaatatatataaatagaccatagtcattttctttagtgttgcatatatatatatatggctgaaatttggtattggaaacagagggctcacacctgggaaagactaattttcttccactcttagcagtcattagttgccagtaattccttgtctaagagtggggctccatgatatttctgccttccatgatagcatgtctattgatctagtcattgttcaggttgaagatgagtgtagcttccctgtcatttttaggtgacattatctcacagcaggcttttggttctttgcctcctacaatcctcgtgagcctgaggtaaaagagtggtatggtagatgtatccattggggttagacaccccataatctgttgatctcagcattgtgaccaattgtggttttctgtaatggtgttaatctgttgcaaagaaaagcttctttgctgaggggtgggagctatatttacatgtgatatcaaggtatgttttaaaatgcactcaggaatcacactgatctaacaaagtggctgtggtaggttctcctataaaatccatgacttccccagccccaagtagttgtctaggttttcagtcccaggctcaatttttctctcccattgagctttcagtccagttaagaggagttggttactgccaggacaccagtgccactattactcatttagagatagctagccatactggttataactttttttattgctcatcagataaatctctcagtgaatgattcacttggttttttgtctccaagtttattccatcttagctttcgagacatagttttcctgattgtaagattaaatggctgtcattttctttcagcactgtatatctgccgtttctctcctttcttccatctcttcctttcttcctttctgttggaagccgacccgcagttcacatggactgggtttcacctgggaggcaagccggggctgaaaagagaggggaactagacagtcgagagaaaaatggagctaagtagcaaatgtgcttataagggggtgggggtggggaggcccattcccaccaatccattctttgagcccggaaccagctgcaggtgatgacacacaggttagggtttagtctctgaaatagctcagtggcctctcagcaggtagcagtgtcttgaaggagaacaatggcagtttgctgaacaatagagtgatctccaccctaggtaatctccttagtggcctccgaggtcaaggtctggatcagccagctttaggctggggagtggggtttacacctttctttcttcttccagaacagggcctcatgtagcccagggtagctttgaaatgaatgtgtagccaaggatgtccttgacattctgatcttcctgtcctcatcctccaagtgttgggtttctggtgtttgccattgctcctggcttgaatatgtcatttcactgccttggtctccattgtttttgtgaagttcagaagtctgtctcactgagaccatgtggcttttgacagctggatatatttttaatactgccatgctaaccaaatgaagtatttgatctattaagtttcttaagagtgattcatacatacatatttccttagggtcctaaagttgctcctgccttagtgactgtgttttgtttgtttgtttgaaatgtgcattaagacattagctgcataaagtacaatgaaagtttcatgtggtttgagcaaaggggaaaatgacaagatatcaatatactctagaaatgccaaggattttatagtgagcagacattgaatttgcctctcaaatactatatctcgaaatcagtttagtacatctcacctagcatttgtttcagtatatgtcttgaatgggtatgtgggtcagtgagcatgtggatagctgaatgacagggagaccaacagaaatagaatatattcgactgccacatagaatcgtattgctgctgctgttgtagtgaaaatgtgtgagaactgctgtgttagtttgttggcttgggagtgaggtgctgagggatttgtcagtattagaaggcttctgcttgtcttcactttttaacaggtcagtgctggctctcacagtaggtgcacatagccaacacctgtagaagctgggagagccatgtggtacatgttctacagtttcctggcctttttagtctattctcaatgcttgtctcatcaggaaatataaacaatggattagccctggagagaacctgcaattcactctttctagaaagaaagttcttaggcttttcatgaatgattcattcattggtttcggaataccgactttgtcttcttcagagtttgggatcgttggttattgaaaagaaacaaaagggcagccaggtggaactgattttgctgagttgctaacacatcagtgctacatgttctccgtaggtaagatatctggactgagttggttgtcaaagcttgctttgccagaaatagttcagaggagtgttctgataaactgtcaagtctgcctttagggtaagtaattcctacagctgataaaaaatattttcattaactttcaaagacattgaaatggtgaatttggatcttgagattctagattctttggaaagtgtccagcctggtttcagagctcttgacccacctgggtagtgattcacaagtgcacactgatacctggatgcaagacctccctctgggtcccagacttggttttcccaccacatgcaactgctaatgcagatcgccagcatttactatacaaagcattaaactgaagaagtttgggggttttgcctaaatgctaatacttgcataagttgctggggaaggcaggaaaactcccaaggcttctagcctgtaagactgtaggattgcatcatagcaagtctcctgcccctcctcttcctcaccacttgcctggaagcccctgtggagactcagcaattatccattgatggtttgctttctctctgcctcttcacccccccatttatgcacttgtgaatatatgaatacaaatatgaatatattcatgaataagacatggaacgagagtttatgcttccttgcaggatgaggcaggggtatttttgagattttggtaacggcagttagtgagcttttcttttctgaaaaagaaatggcagagagtagaaagtgggaagtgcgtgccttccgtacaagtaaagtttaagccaattaagtgatatttttaccgtggttggatgaaatttctagaatactgggaagagaaattaaatataaaattctaatttggtttctccagtgtcattgtttcagtctcttatttatacttttttcagagtcgcccatctatactatcatttatacagaaaagctttgtcatctggagggggatgttccaggacccctctactccaagtccccaaatatttgcatatgtgctacacatacccttttctactatttaatcatgttaagattacagtacttaatacaatacaaatactatgtcaacagtaattgaattgtttggggagtgatactaaaatatgtctgcatatgttcaatatacacaaaagtacttccttctgaataattttaatgcataattgctagaatttataaatacacatgctggatccatgggtatggaaggccaactgtgtttgtttcagaagggagctgagaggcctggtggacttgaacaaacttactgggggcctgacacactaatatgaagtggcttcccaccccatagctttgtcatggcggccacaaaacaaaccttgcccactgttgagcttggtttcagtgcccatttcctaatcctttctgtccagtttacattcagcccaccctctctgcctatatcctggaaggatctagaaaaggatcttgtgaaactaacatcacatagtttggcattgcacctggccagaaatttaatgagaaagaaacttaactgaaagatagcatgggaatttggctttgtgtttccccattagcctagaaaattgaagaattaatggatctcagacattcttcacttcttgctgccaccaagcctctgggaatgaagaattgtaggtctttctatcctttgctgcccacacaggaaagaatacttaaagctactcagcggaaaataagaaaagtaaaggctttcaagagcaggatttggcataattaatatctaagtagaaaaacgtgaactgtattgcattcccccacagccttgcagtcttcatgttatgattattgctgaagaaagcaggtcatgtaaatactgtttagagtagctgaagcctggcatttcagaagaaaaatgacaaccagagccgtttccccgaggcatcataagtgctaattctgtttagtgtgacagttcctaaataactcttggtccctcgcagaagcatgtgtaggtagtgctggggctctgccgtctagagagagagtcacagaggaagctagttgtcagcatgtacagaccaagaaaatgtgtccctggagctcaaaacctatctggatattcacagaagaggtccccgagctagtgtgaatggcaggctgtgctctactccaagggaattgaagagcctgggcactgaaccttcctcacatttgcagtctttgtctggcttctcctcttctttctctttctccttacccttgctcctgccatatctgaattttgaaccctctggggtaaaaaggctccattttagtaatttttacatcactccaatagaaattcctgacctgcattttttttttgcctttttactgattctttgtgaatcatacatcatgaaccccaatccctctcattttctcctcccctcatacccaccctacactcttgagacctcccatccagcagtggaaaaaaaaatcctgtggaattgtagtgtgtcacacagtgtgcccttttgtccacacttctttgcctgcaaatgttcattgcagtgactccttggtctggaacaagacctctggctgctgctactttatcaatactggaacctcactaggacttctctcagatatcatgttgtcctgtgttatggtgattctgtagtgttgaatctgtaggaccagccccttcatgtgcgccagcagttcactgatggggcagatgttggagtgggccaattccaagccctggaccctgggtgcacgagagatctgagctggtcagcctgctggctcgtctgcttccacacccttggagctggctcaccggccaccctcaatccaaacccagggccagctcttcttatgtgctcccaggcaaagtgcagggcctggtctctggagtgttacagctggtgaggaacatggccagctatcccactctcatgaccctggggccagctctcctgactgccatagatatcaagagataaaggaggggaggagggcatctcccccttgtctacaccactataatagacaagaggcaggctgtctctcttgtgttcacatccttggggctggctcacctacaatccccacatccatggcctgctctactgtgctgtccaggtgaagcgcagggctagttctcccaagtgctgcagcagttgaggggcagggacagttctcttgcttttaagaccccattgaggccaactctcctttctgctgtaggtggcaaggaatgggggggggggttctcccttgctcatgtcactacacagcagaaaagtggtgggctcagctctttcatgctcatgccctcaggcaagctccccaatgcccctgccagagtaaagagtcagctctactctgctgcccagacaatgtgcacgacctgcttgtgctgaagctgatgagtggcagagccagttctcctgcctgcgatagctggtgagggatgagtcgatctctccttcttctataccacaacacaggagagagtggtagagccggctctcctatgcttgtatccttgaggcaggctcactagcaactcctacagtgtcagggcccagggtggggggtggggtgggtcagcttttgtgttcttaggcctctaaggccagctctcccatgatgtcgaggcaaagggtggggctagttctgcacagccctcagacattaatatggtgccaggtggctgtccaggtaagggacatctatctgcctgacctttggtggcaacagatccttgctgttacagggtcatggactcgtatgtagccctaggtaccatcactggctactcacatcaggcagttcctcactaccctctagtctccagttctgcctctcttcattgtatccacacccttctgtttctctttctcttccatttctccaccacttacttgctcacctcagtgatgccttgggtctttgaggagtggtcttaggagtgctctgccctcactcatttactatggcacaggggtcatcttaggcctggcctgttccccaaggcctgagcagggctggactggtgatcttctcatgaaagctctctctctctccactctcttctctctctgtctctctgtctctactctcttcccagatccccttcccatgccctaaataaactattctatactgtagctgtcctgtggctggtacctcagagggaagagatgcctcagcatgggcctgcagaggcacctccttccacctcaccatactgtgcctctaccaaacttatccctggcttccttttcttttttctttttataaaacacaacagttcttctagtctccaggttgcccaccccctatatcctggaaggtcatctgggcctgcctaatgtaggacttgtagttgtcttgggctccctcttttcagggaatgttaggctatggtaatcattcagacgttcatgggtaagaatgctgaacatagcctctctcctctctgtcacctttctgatccacatgtggcaaagcagccacgcctccaatgcttctagggacagtgacctacaactcttaaggcatgagttatttggacttgtggttcaggaagtttcaacccatatccttggctccattcatcatggatggtgggaggcttctcacctcatggcatccaggaagtagatggaggccatgctagtgtccnnnnnnnnnnnnnnnnnnnnnnnnnnnnnnnnnnnnnnnnnnnnnnnnnnnnnnnnnnnnnnnnnnnnnnnnnnnnnnnnnnnnnnnnnnnnnnnnnnnnnnnnnnnnnnnnnnnnnnnnnnnnnnnnnnnnnnnnnnnnnnnnnnnnnnnnnnnnnnnnnnnnnnnnnnnnnnnnnnnnnnnnnnnnnnnnnnntagatggaggccatgctagtgtccctggatctcagtttccctttttactcccgtagtcccaacctctgggatggtgccagtcccatccccccccttatttaattattattactattttttagaaatgtgttcagatataccccctaggcccactttattaactttccaggcacttcttaagtctataaccagatagggttggagaggtggctcagtggttaagcgcactttctgctctcctagagatctgagtttggacctcagcacctgtgtcaggtgactcacaaccagctgtaaatgcagcgccagggagcggatccctttctcccttccttgagtctccacgcacagaggaaatattcactagaacacgtatacatgcacatgagttaaaaggaaactttacgtctgatctactatcacgtgctcttgtgaatcactttgcttagggtggtttgggggagtctcttccttccatccctgttatccattctctcagcctgttcacctgacatcaaagaggaaagaagaatctcaaaacgggaagggctgtgtttgtctaggtcaacaaggcctgcattaggaaacgtgttaccatgtggtgcaagttcacggcgagtacatctgatcacaagttccatgttgtaacacatagcctgacagcttttgctgaactgggagtgcagcgtttcagtaggaagtagcagacagctccgcgtccttggccttcaccattagcctgcttgtcaggctatttagactttagactgtgtgggtaagcatgttcagtgaaaactgtggcatgaccatccctatgttttactgtgatgtgggatatgcttcagtctgcccgcaacttccccacgctctcccaaaatagctataaaatcctccaaaaggcattgctattttcagacttgcttccacttagaataattagtttcaatcattactcacaagtttagtgccttaattgggaaagaagagcttattttatttgccctaaaactctctctctctctctctctctctctctctctctctctgtctttctgtctctctgtctctcagccagttttcagtctttgaagaattactaggtcattcctctaagtgagcagagagaagtcttgagtttctgtgtataagcagccaccccacagtgggacctgacctctctgttcctactagatcagcttgcattctgtactgcagctatgtagcctctgagattgcagggcccctgttcacagtcttagttgatgataggggtgtttgtgggcaagggcctgattcctttcagcctggttaggactcagcaagctcatactgctcttgccgtctctgctgcagctaatagctctctagtctattaactctttgtgctttctccactccacatgttctgtgcgctttcgttgcttctcaaatgctctcccgacttctttgtctagttggctcctcttactcttgagttaggggctcaggcattacctctgtagaaacctcctccatccgagtctgaggcagtttcaaagcagcaaatatgcacacaggtttctccagttctgtcttcatagcatgagtcactggtccggttttgctttaggctgttgtttgattaactgtgtgtctccacctctgttccctagccttcatccctagccaacagaggctgggcaagcaatcttgttctttcctaattatctgtggtccagaactgctgtgcatccagtgtttctgtctcacccagcctttgtgcactgatgctttaatccctgcagtgaggcagagctttgagaaataatgaagggaatgagaatacaggtttgctgctaaataacaaacatggcccagaagggcacattctggaagagaaccccagggatgacgatggcagtggtgtgctgcctgattctggtggatttgtttaaagcaccgagctgctgagcacatacatttccacagagttcaaatctggtgttcaaatgacacttttaaactcaaaagcaaccatactacttagctgttttgggggcttacactcacttgagggtcctagcaagtgcaggttggccttaggagaaattctccacagagacattttattataaagacattataagggataaaggtgagtattgtctgtctccagatggaagaaaagaagtttatttgtgaggattctcctcttttgtgcccatcagacattttttaaaatgtcacactgtttctgatcacagattctgggaggtggagtatagctttggcggtatacttcccaggcctctgagttgtggtctaccacaaaacaaagactcttggtttgttttcataaacaaagacagtataactttaagttcttttttttttcaaacaattttttattagatattttcttcatttacaattcaaatgctatcccaaaagtcccttatgcccttccccgaccctgctctccaacccacccactcccacttcctggccctggtgttcccctgtattggggcatataatctttgcaagaccaagggcctctcttcccaatgatggccatcttctgctacatatgcagctagagacacaagctcagggggtactggttagctcatattgttgttcaagatacttgaaacacagataaaacacattgagcatgtaagggtggcgtgggtgagggtctcctgccaccatgttagatgattatataatgtttctagtgaaaaataagcctcaaatgacatacattatctccaggcaatgaatctttcactgtcaaggggatgcggtatagataatagtgatttagagagcccattaggtgggcttgggggagtttttccaagtgtggcatttataatcctgacagggggacagtctaccataatcccactagggaggagagacaggaagatcatatgtttgaagctagcctgctgggcaacatgctgaggtgctgtctcagaaaagggtgaggggaccatagatgtaggaaaaattgtgtgtgtgtgtgtgtgtgtgtgtgtgcgtgtgtgtgtgtgtgcgtgtgtgttgtgtgtgtgtgagagagagagagagagagagagcgagagagaaagggggagagaccgagacagacagagagagcatgtgtgaatagagagatgaaatctatggatgaaattcataggaaaaagtctagaaagaaatttctagaaatattatcattggtggtctttacacagtggtattgtacacttatttttttttcctgtctttgccttataaattacctgggtttatatcacccattatcctcaatttaagatttaatgagaacagaacaaatgaccacaagatctccattagagacttagctaccatgcgagatggagccttagtgcctgacaaccttgagagaagaaaggaagttttctaactgtttctgaaaggtacggaaaatggtgacagtgacacagagatgagctagcagtttgaaacatatcatccataaggagagctcttattcagagtcctaatttcaagtcttgatattttagagaaacatcacaatagctgtgttgtatttagaaggtcaaacatggttactattaagtttatacttaatgggattagcttattatgtatcaggctgatgctgtttagggactctggccattctttccttttggccaccatgtgaagagtttctagtgtcggttatgtcctgtacttgaacatttagataaggatacgcccttacttcccactgacatttctacaagcattgtcgttgtcttttgccatattgtatcatattcagacaagagttgaatcctttgaccttgcttgacctgagactgggcttctctttttggtggcaatctatctttataaggagaaaacactccatgtacttcatccccccaaacagattttcagtggccacactgggaacacagaggaaatcggcctcctcatcatatgggaaactaattgtctaagggaagtcacgtccaaagtgagggcagcaaatcaaacgccctcccagggaagcaactcatctggaaatccatcaccacggagccggctctccctctccttccaggaagcaggatgaagtggccatgtggtgtttgctttaaaatgcctaccagtactccagatctgcttccaattaactctgtgcgtgccattaacaatacgtatgtataaattgatcacagagccaggattttctttaccttgactacaaaaggaagctttaagcctcctagggagttggaacactgatttcatttttacttcgactgtggccaatcgctttaaggaatattcattttagaaagtgggagaggtcaaggtaaatttaaaaagtgcaaaggtccatggaccaaggcagttattgaaagttataggaccctttggtcactgcagagaaaagcagtcagctggtccagggcagacttggcatgcagcaaacactgaggtcacagccgcagtaggttttgtcttggcatttcccaatgccagtgcccctgacaccttgtagcttgtcattaagatgtttgatttaagccaggcggtggtggtacaggcctttaatcccagtacttgggaggcagatttctgagtttgaggccagcctggtctacaaagtgagttccaggacagccagggctacacagagaaaccctgtcttgaaaagccaaaaaaaaaagatgtttgatttgacctcctgttgccaagacatagggcggtgtggtactcaagtgattcccatcatttcttcctccttggttatattagtcagttccctgtgactgggacaaaatgcctaagataaccacctcttaaagaacaatttattttggtgtatagttttagacacttcattctgtggttcattggctgtgttgcctttgggcagaacccgggggtggaaagaacatggcagaggaagctattcatctcagaaagccaggaagcaacaacaaggagaaaggaccacggtcccaatatcctcttcaggaacataaccctgggaacttgatatcctcctggtaggccccagagttggaagactccaccacctctccatagtgcctccttcaaggggatggaggtcttgatacaaaggcttttgcggacactatatccacacaatagcactgattatccttctggtcactggctgtgggtcaaattttaaaaaatggtggggcactgtttggactgaatgtagagaaacaagttgtgtctatggctgtcctcagaactcatgctgcgagaatgtagaggacagaacaccactgacatactcgtcaagacctgctgtgtgccttgatgttatattgtgatctcatgggtcagctgcagagagccacaagtcagatgctttcaaggtgtggggttgaaatgctaacgtggtttttgtttcaaagctgtcttcccagacagtgagtgatggaggtagacccggctgagctccacagagctgtccagcctgtctgagcttctcaagcttgagaactgcctggggaaatttgttacagctttcgatcttgggcctaacctcagagattcagtcaattagggtttcttaactgtattaagaacaagagaggcagatgagatggccccgtgggtaaaggcatgtgtggtagaaacctgtagatagaactgaacatggcaaggtgaagaaaagaagattcagctccatgagattgtcttccaacctccacacatgtgcaactcacacaccccgcccccgcccccataataatgctaagtaatcaattcacaaaagtgcagggaccgggttaattctgatttatgttgatgatcagttagtcgtaggaatttgagaaatgcgagggagggtagtatattggtattagagctgaataaatcataatttcggggacacatttttttaaataacttttcttctgcccttcctgccattttggtcttcctgccttagtgacccagttgtattcatgggtctattatgtcttccttttggttgggtgggtgatgcagataatttaagaatcagctgacatcaaacaacttaaggcagagtccaggttaagagtgcttacaagatgcttcttggtcctctcagtgtacgttcattatacatgatcctgggttacatgaagacattttaatatgaagatggaatgtgctttgagcttattcttgttccatactcccaccctgcccttcctgttagccgtcttatttccctggagagttttgattctactttaatatcatatgtacacatgattttacaagcccgtataaaatttaggagccacaaataagagaaagcatgcgatgtgacatgagtcttcctgaggctaagttctctaaatatgattatctccagttgtggccagtttcctgcaaattatagaactgcactttgtagctgaaaggaacttcattctacatattcaacatgctttctgaagatgttcttgttttcttgcccattggtattgctgggatccaaggactctgtaaagagggcctgacctcagctcctctgaccttgctactctctgacccacctgtcaggcaaaggatacagcaaacaggacatatttcagggcctcccaacagcatttgccagctgtgtaatcctgaccttaaacctaagcctagacttcacctgtctgtgggacactttgcatatgaacaactgtgggctgtgtggagatggcagggttattctgtacagaagcattggccatagtgaggctgatggaaaggcaggcatgttggtttcttatagctttcccagctccctactcatcctgggaaactgaactttgaggaagcccatcttaggagcctgctgatgttcatgtggctggtcggtagatctcactttgagcagcacggacctaagaggtgtcctgctgtgtaggttagctgtgaacttctaatgaagagtcatctccagttacaaatatatagttcttttttccagtcctaaaaacataagaaaatcctaccttttacttaaccacgatcctgaaaataggggatagaaaagtttcagccagcaatgtatcttctcaacttcttaaattattacttgtcttcaatagcataagacatacaaatgacatcagagcaagggataatatattatatgggctgagagaagatgaccatggccaggtttcagatgttctaaattaaggtgggttatcaggatcagtgatgatgcctcctttagggcctctggagttcaccaaaatatgaactatcaaaaaatgtagtatctttcgttcctccatgaaatcagcttttaggctcagatcatctggagaggatgttaaatccacactgctaggctcagccagtgtttaattaagttggtgctgggcagcacccaggaatttgtacctttagcacgcagtctcactctgaccagctcaagcgttgtctcagagatcatctctgagagcggtgagcatagaaaacagtgccactggcttgggcctctgagctggatgaatttggggtatatgcagagatccacctgtcctcagctatctgaaccagccccccagggttaggatcctgctggccgttacaccactgcctgtagacattgtccctcagatgccagagttctgtaagcttccatagtagctgtgacctgatggggacttgtgcgctgtggagattctgatgagacctcacttctgctctcgggacagtgaggcctcaggtggcagtgaagacatgggtcttaataatcttgccaggatagtgattgtttggaagtgttttccctctctgatctctgggaaaacatcttagatctcagccacatttttcggagtgttttattccctgttgtattagttactgtttttattgctgtgacattacctgatagaagcaacttaaaataatgaaggattgtgtttggcttgtggtttgctggtcaacaataggctggcttaaaacctagcaaacacataagtggatgctcacagtcagctattggatggatcacagggcccccaatggaggagctagagaaagtatccaaggagctaaagagatctgcaaccctgtaggtgcaacattatgaactaaccagtaccccggagctcttgactctagctgcatatgtatcaaaagatggcctagtcggccatcactggaaagagaggcccattggacttgcaaactttatatgccccagtacaggggaatgccagggccaaaaaatgggaatgggtaggtagggaagtggaggggagggtgtgggggacttttgggatagcattggaaatgtaattgaggaaaatacataataaaaaaaatatttaaaaaaaaacctcagtgtccttctgcctctgagcgctgacattacaggtgcaagccaccatgctgtgtcttgcctgagtttttagtttcactgatgagttcctctttaatgtcgtcatggaaagttatccagccctgtgaaggcatttattctgttgtccctctgtgctctttgcacatgtcactctgcggaagcatggcagcagctggtcactttcacctgcaatcaggaatcagatgatggatgccgatacgctgcctactgcttccccttcaattcactctaggactccaggcgagaaattgatgtcactcacattttgggtgggtcttccaatgtccttaacccagtcctgaagctctaacagttgtgcccaagagtttatctctcaggtgttccatcttgccaagtttataactaactgtatctcaccagttgatggttctcagccaaaaagatacacacacacacactcagaaacagagatagacacacagacacacacacacacacacacacacacacacacacaaacacacctctcctccctactagccaggagtaatgctatctgtaatatccactgctatgctccaggcagtgttaatcaggaaaccagtgaaagttgctggtgactgaactcttgggtggacactccccaaacacccagcagcacagaacacatctgtgtgccaagtatctggttaaacttgaggcagttactcaggtaggaacttccaggaggaatcctgtttgtctgccctgtgtttgtgtcctcttacacttcctagggtttacagaggcccagactgcctgacagagtccactgttggggaatttgcatttgcatactgtcgatgattgtaaatcaaaccttatctaaagtcaacttcctgggtttccccaccaccacctggttcattctttctgtagcacttactgacaagtgtttggcggagtcttagcttctgcctcaccttttctgttagggagtaacgaaagatcagaagtttcgaatctgcctcttggccatcaggtgtgtggttgtgtgctgcccgagggcatgaaaggagattgctctggctgaagtgttctgcagggctatctgcagctctgcagagtctaggatccatgcttaggcagaactgaagcagccccaactgttctcaaacctaccacgtccctgcgtctgcagaccttgttacaagatgcatcactgggccccacccagagtttctgatcaagcagacccatggtgttgtcaaagaatttctagtgatttccaggagatgctgatactgctgtccctcagaccacagagaagaaccatagagtagggccttgacttggtcctttgtgcctagtggatggattgaggtgggtggtggcaggcttggaagctatgtagtgtctccatgagggagattggagtctgaaaggtaacccaacagtggaactgaacacagactacacacccaggtgactgcagagtctctggtgtggggagagatgggaccagggagggtaggggttaatcagagtgtttaggaagaaaggaattcaaacatcaaaatgaggctcaggctggggagtaggcagtcctttgggataggaaaaagtagatgcttaagtagagcttaagctttaacatgaatgttaacgaggcggttagccatgcaactcagaactcaggcaaggcaatggtgtggtgctgatgacacatacctgtgatcccagcattcagaggcagatgcagaaggaagataatgtttcaggccagccttggctgtatagtaaaaccatgtctcgaaatacaaagtcatcagcaataacagaaaaccctaggaggtccttctgaaacagagctatagattttggtgccttccagagagtggcttaagctgactcggtggggctagataggcttgaggaagaacagctcagcagagcagaagtatacaggactcataagaaagaagccaggaactgggctggggagatggcttcgtgggtaggagttctcactgtgcaaaaatgaggccctaatttcagagcagcatccacacaaaaagctggtcatggccccctgaacacctacttgtaaccccagcattgtagaggacagacataggaggattgctggttaactggttgccagcctagctccaggcttactgagggaacttgtctcaaagaaataagaccagataccctcctttggactccccattcatgtgatacccttggctgtgtttattctcctacacaatgcatagatctctctctctctctctctnnnnnnnnnnnnnnnnnnnnnnnnnnnnnnnnnnnnnnnnnnnnnnnnnnnnnnnnnnnnnnnnnnnnnnnnnnnnnnnnnnnnnnnnnnnnnnnnnnnnnnnnnnnnnnnnnnnnnnnnnnnnnnnnnnnnnnnnnnnnnnnnnnnnnnnnnnnnnnnnnnnnnnnnnnnnnnnnnnnnnnnnnnnnnnnnnnnnnnnnnnnnnnnnnnnnnnnnnnnnnnnnnnnnnnnnnnnnnnnnnnnnnnnnnnnnnnnnnnnnnnnnnnnnnnnnnnnnnnnnnnnnnnnnnnnnnnnnnnnnnnnnnnnnnnnnnnnnnnnnnnnnnnnnnnnnnnnnnnnnnnnnnnnnnnnnnnnnnnnnnnnnnnnnnnnnnnnnnnnnnnnnnnnnnnnnnnnnnnnnnnnnnnnnnnnnnnnnnnnnnnnnnnnnnnnnnnnnnnnnnnnnnnnnnnnnnnnnntttaaaaaaaaatcacccccagaagagtgtgttcagggagctgccctttgtactgtgcagtcagtaatttttcagctcctcatctgtatagttttattttggctcagtgataagccatgctgtccccctgacacaggatgtgcataagcaagttccgagtgcacacttgtaatctgtagcactcaagaggctgtggcagaaggattgtgaatttgaagctggattaggccacacatggtaagattttatctcagaagaagagaaaggaaataaaaatagccaagcatacatgaacacaggctgtggtagtcacctggagacagagaagcagtttgctggctcagaattaagctggagtcatttttgccccctctaacccaagcactgattctcatccaggtgctcttgggacactgagtctaccagtgtcacagcatgtataaggactggacagctttctgaactgtggagactagaatgatggagagaacccatatttttctgaacagaggggtcctcagttggtgatggcttgccagctgataaatatttgccttctaattggtggtgtttagttgcatggttctttgcaaacccttttgtttgtttgtttgtttgtttgttaaatttttatgtccatattttgcagtagcctaattaagtattgtcttccccagtctttgagaacacagtgacgaaagtcagcaggttttaaagaatcatttgtgtctagtttctgaggacgctatgcatagggacacacacacacacacacacacacacacacacacacacacacacacactgacctgtgttctgtctttgcagttctgtacagagctgaaccagccgatcctgcccaacatccgcaagtggaaggggtcccgaggatgctggaggtccattgttgctgagaagccttccaatcagctccagaaggtatccctctctgcataaccacctgcataatttttgtacttaaacataattttcctcccaaaccaaaggtgatttatttttttctttgtcactatacgtagtccattttcgcattatctgccataacttttagtcatttctaatgccctaggcctctttttatattttgatcaagaatgaatttctgcccatatagaaatgggaatttagcatcttgggaggagaaattctgtctggggcacctatgcatttgtctatatgtctgccctttgtccttgtaaccctgaggtcacagctctacccctgccaagctttcagaaaccccttattcactagctgggaatttgcactctgtagttcacacattgcattctctcttctctccctctctccctctccctccctctctccctctccctcctctctccctctccctccctctttccctctctccctctctttctctctccccctctctttcttgcttgtgtgtgtgtgtatgtgtgtgtgtgtgtatgtgtgtgtgtgtgtgtgtaagtgtgtatgtgtgtgtgtgagtgtgtgtgtgtgtatgtgtgtgtgtgtatgtgtgtgtgtgagtatgtatgtgtgtgtgtgtgtatgtgtgtgtgagtgtgtgtgtgtgtatgtgtgtgtgagtatgtgtgtgtgagtgtgtgtgtgtgtgtgtgtgtgtatgtgcacacacacagaggtgtgccatcaggtgtcttcctccatttctccccaccttttcttttgttgagacagggactctcagttgactgacggctcacagattcagatagactcagctaatcaataagcttcaatgatccactgtgtctgccttctcccccaaggctggggttagagacacaggccactatgtccagttctttatgtggttccaagttctaagctcaggtctctctgcttgtggcaccttattgacagccgtcgccctagcctgggttcttagatttttttttttaaaagaatacttcaggtaattacttgaattgaaaaagcattgtttttatataatctgtacacaaatgcagatgttttaaggttctaatgttccttatctgcttacaatgttatgggttatatttacacgattgatacttatgacttggaactcaaataataaatgtagaatggattaaaattacctatccatctatgggttttgactataagatcacgctcttttcagaggctcctgaaaactgtgcatgtaactcctttatctagctttgcagtgttagggtggaaacagacttgcagtggatactgagttcacagtggctgaaggagttgacgtggggtgcatctggtcttccaaattgtagttcagggctctgcttttcggtccacatgaagaataatgctaatttgctgctttaaagaaaacaaaaaacaaaaatgacaaaaaaaacaacccttttcatggatctcactgtatgaaaattcatgtgacttccaagggtccagtcaccttcattcattcattcaataaacatctgtgaggggttattcatgtatatttgagaaaagcagacccagcaacatagccctatctgtggatgcacttctgggtatcccaacccctttctctaagtttacagccattgagagggacaagtcagctcacctccctgtaggagggggagccacggccatcagagtactgtcactgagagctctctgctttagctatttcttctgtatgcggtgagttccttcctcagctcacaggacagccccagtaagaaggagacagtgagtgttggggtgcttcctggaatagagtccaactagggcttggtaagatgtgactcagataatggtgactttgaactgggatccctgccagtgtcaggctgcagccatgtctggacctggctacctgttattttgggcccagtaggtcacagcctcagagattaatggcatgtaagagttctttaactttaatgatgtacatatccaaaaatcattttaagcagaatgtgagtcaggcatcatacatccatggctatgaacctttagtccatatactgaacagctgttgggtctctgagccctgcaatcatgtccaggtaccaactagaggagcagtttacaaataagaaagcagccaggcagtggtggcacgtgcacttagttgcaggactcaggagacaccactcaggaggcagaggcaggggaatctctgagttcaaggtcagcctggtctacatagcaaactccagggaagccagggctgtacagagaaaccctgtcttgaaacacatacacacacacacacacacacacacacacacacacacacacacacacacacacagagagagagagagagagagagagagagagagagaaaagagagagagagtgagagagannnnnnnnnnnnnnnnnnnnagagagatatgagggggaaggagagcagagagacatagaaacaaatgtaggaagaaattattttcctgtcattgggagtggcagtctacctgtgcccagggagctatctctggcataagtgcttttctgtgccgtggccgtcctggccaactgagtcatgtctggaagggttcctgagagaggatcagagccacagtaagaaggatgagaaagattcacagaagctgaggggccttgatcaggggtgggagcagcatcggaaccgagtcctcccagaataccctctcctcctacatcctagagcattgtggagccgggatgttttcagacagctggtatgagtgatgcctgaggcagtgtgtggtggatcttctccttgggtaacagtaaacaaaataatagcctcctctctagagcctaccatagtgactttgttctctctgtcttcatgaggaactgagtcttagacacactgtggaccttgacttgatctccagatacagctaggctgagacccaggtgtgactatgcttaaactagtgttatctttagttgtggacaaggagagtcagtctttctttctcctttctttccttctttctttctcttcttggtctttctttttctctctccttctttccttctttctttctttctttctttctttctttctttctttctttctttctttcttcatactcactttacctccctctcactgtccccctcccagtcaccccattctacaatccttcctcccatccccccttgccatcttctctgagccctcccccgctcccagatagctagtctctgtgaggctaggtgcattctctaccaatgaggtcaaacaaggcagcccagctagaagaagatatcccatatacaggcaacaggttttgggatacccccgccccccagctccagttgtttgggatccacatgaagaccaagctacatatctgctatatatatgcaaggaggcctaggtccagcctatgtacgatctttggttggtggttcagtctctaagagtctcaagggtccaggttagttgactctcttggcttcctgtgaagtttctatcccctcccgagcccaaaatccttcctcctactcttccataagagtcccaaagctgggcaaggagattcttacacaacataaaactcatgttcatgtcctttctacttctctcctaaacacctgtttaagtgtggcattcctgtcaaatatctggctgggttgtgagctgaggttttgtgtgtgacagtggctgttcagaggtggctaaggttaaaggttacttcctctcccattgcaacatagtagagcagggtcaagtgctgcttgcctgtttgatgacccgttgctctgtctctggtgtcaaacacttaagaatgccctggtgaccagcagtggctcagccagactaggcagactgatgcattgctttttctataaagtcccagaggcagtgggcaaagcaagcagaatggaagcaacttctctgattcctagagccagatggggggccttgaccaagttttctgcacctccccatcagggcctctgacccgggcttcagacctctgtttgctgccctgtccatctgcacagagcccagtttcaaatcactggggctcctaagcattgacctccacccatctggtgaatactgactgagaggtgatgaggggctaggcaccatttgtgcaagtggtaacttacccataagcataccagccatcagagtctttggactcacatatttgcatgttgtgtgatgttaggggagtttctcagtctctcagaacagttgtggcctcattggtcaagtgcagatagaagctgttgcctcgtgccatgtagtcgttcaaatgcaattctatgcctggtatgtgcttctcctaccttcacccatgaagggaagagctaggcactcttggccatgagtgaaactctgcagtgggcatcagtgtggggtgcactgtggcttggaggcatgttcttcattatggaagcaccccatgtgagtgaccgtgaggacccaaggctgagcctgctttttgtgtctggcagctttttgttatgctgtgtgcctcttggaattaggaacctggcaccaagaccctgtttccatttgccctgcagggcccctgctactctggattcctatgggacacagcagccaacgtggagctgagagacatccccgggcgggagagctcacccagcaacggtcatgctaaggctgtgggccccagccctttcctcgccagattcaaggtacctgcttcctgtcacctcaaaatccagttccttccaaaggggaagtctttgtgacacggacccagagaacccacatctttctctcttgatggtattctcttagggtaggattagtacctattctggaagctccctggtaggtgaccttctacagggcaggagtgaaaggatttttgagggcatcttagacccagaaaaatctagtccataacaagaaggaaggcagtaacctgggaggagtgaggcacccttgttgtctcagcaacagggactgtggcaaaaggattgcttgagtccaggagttcaagaccatactaggcaacctagtaaaacccctcctcaaaagcagattgatagatagatagatagatagatagatagatagatagatgatagatagatagatgatagatagatagatagatagatagatagatagatagatagatagatgccagatagtaggtagccagatagatagaagggaaagaaagaaagtgggaaactaattcatacagctgtccccatacatgctatacagcagaatcagccatcttaaaatcaggcatttcccaacccaagcctcatccatctggatagggcccaggtggttttctagtgtgttcactggctctcctcacctgtctgatactagctaatggggtcagaatggccacatttggcagagcctgctctgaggagcctctcctcctcaactgcccctcaggcctcattgtttagatgtcaagaagaatgggcccactaagggcttgttggattggaggtgagatccagacggagctctgggcagagggacccctgtcattggcctctctttatatatccttgtccatgaagaacctgcctgggagcagttgggtagtgtgggtctcaggatcatctttctgctgtggcctgcagacctcttgacagttttcccgaacaccaaagtgctttgatgatggacaacatgaaaggaagccagaaagtcaccacagaggcaatggacctcatcactacttaaccatgaattccaagtcaggcagcttgatggcttttgagagcccagcaagctgttctctatgagcattgagaccttttctttctgggtgcctcccccagtaactctggggccttaaatttaccccctaagcccagcatcatttaactccagcaggaggtgggccttggggacaacctgtgtctctatcatgggatgtataagcctgtgtcccatctctcaaatttgtagtagtaaaacttataaagttggtgtatgctcacattgatgtgtctgctgtggtaccaagtaactccttcaatccctcttcctgccatattgatgaggttctgtcttgtattcctggcacctgtggttctgatccatgagttggccaggattatctttaaaccgaacaatacatttaatttttaaataatttgtcctggctctagctaactggaacaggcagccacatagctgaaaagcaggctggtatttttgctggtgctatttttttttttttttgagaaagagtcttgctatgtggcctacatagtgaactttccagtcctgccccctcacctccccaagtacaggcattacagaatagctaccatgcctacaaccttacaaaaacaacctggtaaacactgtctctagctaacaataaaagacagctatatttaataggctaataaagaaaatactatctctggcattgggagtgatcgtttcaaatcactggaagtaatcatccagcacagcccttggcttcttgttcttcaagtcatgttcaaggcatggtcagtggtctaggacacagacagcttatcctcacaggcaacatgtcccagtccaaacctcaaggtggtttctctggctgtgacagtggcatctatagagctgtcagtcctgatggtgatggtgaactggggccacacctgcaagataagactggtactctccacatcttggggcccgtacactcatcctttctcagaagtgtttagtgtttgttgccatggcaatagaaaaggcagacttgctaaacagagcaggcaagcaatgctatgatagcccagaagataaaacatccttacatgtgtacactaccaggagaccacgagagccaccctggggcccaggctcctggtagatcttctgactttggttggttggtgagctttggttcttatagagaaatcaggttaaagtgtatgttagtacacaattggttccaaaggaacaaagatgagtgggtggggaactcaagctaaccttgtagagaatggccttgggtctgtaacatctagatactagagacacttccttcttgcatacagttgtgcaaaaagtttactaaaaatcctcccacttccagatatgtaaagtttttcaggactgagggaataaaggtagaaggctggaccttagagttgtagactcttttagattcaataaatctaaaataaaataccttgtgttgcctcttatgcatacgaactagctctgcttctaattattattgccaactgtgtgtagagaactatttattaatctattataaaggaaagaaatatggacatctaagtaaggttttacttgttgctttatttcctgctacccaggtgggaagtaatgacttaaccctggttaacctccagctgacagccctggccctcccaggagctgagaattcaagcaagaatcacagtgatggccaccgattattgaactttgcactaaccctccaggaaaccctgaaaggtagggatctctatctctgtggatgggcaacacttcctcagtgcaggaagtggtgcctctttccagatatctctgtgacctctgacctctgagcccagccactcagcagatgtcacagatccaggggcattcatactccttgcgcttgtggattctggcagacctttctgcatgcccttcctttgtgtctgagagcctctccagtgggtgtcaaggtaccactggtccgtcagcctcctggatggagaggactagaggaggaaatataagtggcgatatccctctgctgtgatcacacttcctgggttgactcctcctctgatggtaccacctgcagatctgcacgtgttcttgtgaaggaggagcaggaggcgacaaggtgaagaactgcagccggagacctcaaaattcttcttacattcttgagtcttgactgctcttctaacttcctagacttcttgtcaccaacttgtcccatcatagtgggaaattcagtcaataattggctttggaaatgcttctgtccagttataacattacattttcaaagcccttctattgcagtaagatagacataaagtttgccgttaggattggttagtttgcagttcagtggcattcagtatgtactcaattctgtgcaccggttaccaccgtctctctccagaacactggaaccttctggaactctgtaacccctgaatcctggtcctctgtcccttctagtgtctaacagccatcacactatccgttctgtttctgaatttgatgacgtgcttcaaatgaggagaagcacatggtgtttccctctgtctggcttttctcacttagccttgtattttccagatgagtggtgttgtataatgtgccagatgttccatccttttgggggctgaataagattctattgtttgtatgtgctacattttattgtctatctgttggtaggctcttgggttgcttcaacctttgctcactatgaatttggatatacaggacccactctgagcagcattttacttaaatgatggatctccaggctgaaaaacacgagtaggttcaaactgagataccacatccaacaagtagctatgtgggaaactcttcacccacaaccagtctctcagcaatgtaaaaggatgacttgagaccttttcatatctgtggacatttctattcgtctctatctcatagatgcagggaacagagatgctttttcataattttcctgtgagccataagctccctggttaccagggagagattcaggagtttatcagaaaacttcaggcaagttccacattgccaagtgcctattgactgacccacagcatgactcggccttgacacattcaggtagggacagtgactcatgccccccattcccctgcttgtctgtcactaatacccagttaattgttaactggccacccaggagattcaggaagtgcttcaggctgcagtgaaggaagatagatgagtgtcgggttctgctcagaggaagataaagctccccccaccccctgccccctaacgaccaccccccccccccagacagaaacatctgattcaaaaactccaggcctttctgccttggtctggaatgtgaaacccagttggcatcagggatcccgtggttgtcctttcgcagaaccttctttcaaccttatcagggcttgaggacaaggtcttcctctgtgagcccagtgtcatttgtggtatcttctaggaaggcccagaggtgggagtgcacctcagtggggagccacttcagtgggtgttgttggccctttctaaatcaaggggatctctgggaaaattggctcagaactttctttcctcactcctaggaagtcagggaacagtgactaggaagcccacccaggtgtgtgatcaggagaattcgtgctgcacattcttgggggcaaagctgcggccatgtcacctctgacacatatcgagccggaagagagggtgtgagcagtctggatgtgcccagtcaaaaggagcctttgttttcatttgggaaccacacagagctggctgattgacccctggccccagcctcccgcctgcttgccagagtcaccctttcccaccagtactcaggtctgcacccgactgaaagccttcttcatttacatgggagctgtctgcctccgtcttccagaacctcaggtttcctagtcagtacatgtgctagcttccagaggtcttcctcctcctggcacagataattgtctgcttgtacagcagacccttaccttatctctccacgtgtcagggcaaacagcagtctatatcctgggcttcttcctccctcactctttgggaagaactttgggtttgagagccacctccatgacattgggcaaattattcagttttcagagtctgagctttctacctgcatagaggagaacgtgatgccatctgtctcatgggagctgtgacgatgaaatgacatgctgtccaggaagtagtcagtacagtgtgtgatctgtattaagggctctgtgactgctctcgaccgaggtcatcagctctggggtcttttcagcaatactctcaagttggttttcctatgagaaacccgcattgggttttcaaaacagcttgggctcaccctgattcagaccgtggatgtgctctaagttttaggaagtgggagaggcttctctggggtcctcgtgggggaggctgtcatttgtagcacacaggtgccctctgctggcctcttgtatcatttcactttagatttctttccctttagctgtcatgactaatggtgggtgaatattaataccacggaaaaggcttttgctgaaggtcttggatatgccattttgtttatgaactgctttttctaaagtgcctttcacagagggcaacagaaacctcattacctagggactgtggcttccctgcagtaaattccccacaagggtcagcccagtccatgggaatctagtggagcctggctgggggccattgttcttttggaattcctattcacattacttgggaaatacttcataactatccatttcctgcaggcagtgagagaaatgtctaaaatacttcaaaggggcaacctttccacttgtcccctgccctctcattgtagcccttatttacacataagaaagtcctttctgctgccctgtctctggtagactcttgctaacatggctcaggagagaaggaagaagatctgcactgcctgggagggcctgtgccagacacttcaggaactctggactcccgcacacttgtcaacagctatcaggaaatgggctgttctcttcatttggtagactgagtccccgcctacggcttccaagctgagaggtgacaaagaccagagtcacccaactatttgctcctaggatgagacaggaagtagtgaccactcctccttctgtctgaagctgaaacagggcatttcatattcaaggcttacctggatcacaggcagcctgggcaatttaggaatttttgtcttgcagtaataagtaaaaatggggctggataagagtccttgcctcgtgtgttgtgttcagtctccaaaagaaaaggaaagaaatgaaagaaagaaagaaagaaagaaagaaagaaagaaagaaagaaagaaatggagagggagggagggaagggagggagggagggagggacgcccatataaggagttacagagacaaaatttggagnnnnnnnnnnnnnnnnnnnnagagagagagagagagagagaatatgaaactatggtatatgttcataatcctagcagtgggtgatcatgatcccaggctgttttgaactacagcaagccactgcctcaaaatcaaaaacaaagagaaaaaaatgagaatccaaaccataaatgctgattgaacgtttgtctaactttgttgtcattgtggcaaagatttgaaaagctcatctgtgtaacagagtgtcactgttcttttaatataaagagagcttctgtaatcagttaatgagttgttagtaacccaaggaaagaggtgtctgtgccccacccagatcacggctggggggagatgggcttccttggcgaggtgactagttctaagcctgggccagcaaagatcgaggtgattctggagtgttttagcaggtcacaaagaatgaaagcacttagagcaaaaaaaaaaaaaaaacctgaaagaccacatggcgggcgtggagggtgggggaccacagactccttgcaggaaaagcaaagtaacaaagtaaataacataacagtgaagataagtcagggtttaaaatatataaccgggaagttcatacttatggaaacaaatgcttgaacgagttaataaattcttgtgcagaattctaaataatatgtgggggttactccatcttcaaggccgtggggggtgctccatcctcaaggctgtggagcacatctcatttgtctacgtataggaagaagacataccaaatcatttgactgaggatgctcactgttggtgttagtgcagagaggcattgctcacattgctggacggacagaggaatagcctccgataacgaggctagtatcacttatctagaatataaacaataaccatacgtttaaccgatcctcttgtacagaacatgaagcaggaacatggatacagactgtgaagtcccagagggcagggattgtcttgtgttcattcttgactcctgcacaggcaggtcctgacaagatgctctgtaaaggtttgctgaactgttgttagatatatgagcaaggcctttttgtcctttccccactgtaagtttagagcccagatagagagaatgggggtgtctctctctctcacactatgcttcatttccaaattaacccatgttcattgtcagtggttacacaagaaagggccgtaaaacaagaaccaggcctaaggccctaaatcctgagtggtcaaaccagagcatcacagtccctttccaggggtcatggctaatgttggctttgcttcctacctgctcttaattttctatcttttattcccaggagaaaaggatgttgttattttaggggattttggccaagggccagatagcaatgactacgatatcctaaggagagaaaaatttcaccacctagtcccggctcacactttcaccaacatcagcaccaggaatcctcaaggctccaagtctgtggacaacatctggatcagcaaaagcttaaagaaagtgttcacaggtaggagacgcctcccctgctgtctctgttcagtgttgggctgaagacctgtaaacatctgaagtaaccaatgctagtacttatagtcttatgggaaaagaaagactatatcattgttgaatcagagataaatctaagtgggaagggcatgtgacaaataatttaaagatagccactagtccatgtaagcattttgcaggcaaacctagttagagtcacctctgtaggtcatcagggtcgtgattcagagatgaactgctaacttacctgaacgttaaaaacacttagtcattcagtgaacatttgtcaaatattcaaatgctgtgctgcagaatgaggtacactgtccactttcataggtgaggagacatgtcacaattagtgtttctgtcactgtgacaaaagtacccaagataatcaacctacaaaggaaaattttttctttggctcataatttcaaaggcttcagtccatggacacctggtgtgacggctcttagatctggtgagataatgcattgtggtagaactatctgggacttgtgtcaggatttgtgaatttgaggcattgtttcatctgttccctccccgcaacaaccccccgacacaccccttaaagcagccaagaaggagtgggaaggatccagggagtggctgccgacccagtgtccctgaaagggcatgtgcccaatggtttaactttccctacctcctcaactttctgtcatctcccagtggtaccatcagttggggaccaagcctacaacaaacacatgagcttttggggaacctttaggaaccaatatcataacacataataccacataaggacaagagaagtcctcagagctcccccaaagaacacagcgtggtggatactccacatagcctcagacagtgagccacagaaagaggagatggctagcactatggtagaatggtatgtacctccataggtatgaatgtggtgctgcagatgaaaccccagagtctttggatgctcagaatgccaagcaacattcttgccagtagcagagtatttgatgaaagactaaaatggtgttctaaatccctcttgtagctctacagaaccgtcatgtactatagcaagagacttaaaaaggaaaagaagcaactcctgggtcccactgcaagacttggccacacactcagggcccagttccttaggatttagaactttaagtgtggataactgtgttgccagtaggccttcagagctcatctgggcctctattggacattgactgttatcggccatggcaagatgtgatttgtagaacgtgtgttggagcccagggctactaggctccctggagggcacttgtgggaggcacttctgtcagaaatggtgaagccaagccatcctttcatttgtcccccaccaccaagatgtggaagctgaggtgcatggacaagttctcctgccatggctgtcagctatgctgcccaggccaaacctggaatccaggccttcatatcttacattaaccctgacggcacatatcacagaggggcgcaggcagtgccttgtaattgttctacaattatttgtggttttcagatataattcttatttcttacatttctccctttgcttcaaaggtattaatagtttcttagtaaccattgtacgcttctccttttcatcttttcttttttttttattaggtatttagctcatttacatttccaatgctataccaaaagtcccccatacccacccacccccactcccctacccgcccactccccctttttggccctggcgttcccctgttctggggcatataaagtttgcgtgtccaatgggcctctctttccagtgatggccgactaggccatcttttgatacatatgcagctagagtcaagagctccggggtactggttagttcataatgttgatccacctatagggttgtggatccctttagctccttgggtactttctctagctcctccattgggagccctatgatccatccattagctgactgtgagcatccacttctgtgtttgctaggccccggcatagtctcacaagagacagctacatctgggtcctttcgataaaatcttgctagtgtatgcaatggtgtcaccgtttggatgctgattatggggtggatccctggatatggcagtctctacatggtccatcctttcatctcagctctaaactttgtctctgtaacaccttccaagggtgttttgttcccacttctaaggaggggcatagtgtccacacttcagtcttcatttttcttgagtttcatgtgtttaggaaattgtatcttatatcttgggtatcttaggttttgggctaatatccacttatcagtgagtacatattgtgtgagttcctttgtgaatgtgtaacctcactcaggatgatgccctccaggtccatccatttggctaggaatttcataaattcattctttttaatagctgagtagtactccattgtgtagatgtaccacattttctgtatccattcctctgttgaggggcatctgggttctttccagcttctggctattataaataaggctgctatgaacatagtggagcatgtgtccttcttaccagttggggcatcttctggatatatgcccaggagaggtattgctggatcctccggtagtactatgtccaattttctgaggaaccgccagacggatttccagagtggttgtacaagcctgcaatcccaccaacaatggaggagtgttcctctttctccacatcctcgccagcatctgctgtcacctgaatttttgaccttagccattctgactggtgtgaggtggaatctcagggttgttttgatttgcatttccctgatgattaaggatgttgaacattttttcaggtgcttctctgccattcggtattcctcaggtgagaattctttgttcagttctgagccccattttttaatggggttatttgattttctgaagtccaccttcttgagttctttatatatgttggatattagtcccctatctgatttaggataggtaaagatcctttcccaatctgttggtggtctttttgtcttattgacagtgtcttttgccttgcagaaactttaagtttcattaggtctaatttgtcaattctctatcttacagcacaagccattgctgttctgttcaggaatttttcccctgtgcccatatcttcaaggcttttccccactttctcctctataagtttcagtgtctctggttttatgtgaagttctttgatccatttagatttgaccttagtacaaggagataagtatggatcgattcccattcttctacatgataacaaccagttgtgtcagcaccaattgttgaaaatgctgtctttcttccactggatggttttagctcccttgtcgaagatcaagtgaccataggtgtgtgggttcatttctgggtcttcaattctattccattggtctacttgtctgtctctataccagtaccatgcagtttttaccacaattgctctgtagtaaagctttaggtcaggcatggtgattccatcagaggttcttttatccttgagaagagtttttgctatcctaggttttttgttattccagatgaatttgcaaattgctccttctaattcgttgaagaattgagttggaattttgatggggattgcattgaatctgtagattgcttttggcaagatagccatttttacaatgttgatcctgccaatccatgagcatgggagatctttccgtcttctgagatcttctttaatttctttcttcagagacttgaagtttttatcatacagatctttcacttccttagttagagtcacgccgagatattttatattatttgtgactattgagaagggtgttgtttccctaatttctttctcagcctgtttattctttgtgtagagaaaggccattgacctgtttgagttaattttatatccagctacttcaccgaagctgtttatcaggtttaggagttctctggtggaatttttagggtcacttatatatactatcatatcatctgcaaaaagtgatattttgacttcctcctttccaatttgtatccccttgatctccttttgttgtcgaattgctctggctaatacttcaagtactatgttgaaaaggtagggagaaagtgggcagccttgtctagtccctgattttagtgggattgcttccagcttctctccatttactttgatgttggctactgctttgctgtagattgcttttatcatgtttaggtatgggccttgaattcctgatctttccagaacttttatcatgaatgggtgttggatcttgtcaaatgctttttctgcatctaacgagatgatcatgtggtttttgtctttgagtttgtttatataatggattacattgatggattttcgtatattaaaccatccctgcatccctggaataaaacctacttggtcaggatggatgattactttaatgtgttcttggattcggttagcgagaattttattgaggatttttgcatcaatattcataagagaaattggtctgaagttctctatctttgttggatctttctgtggtttaggtatcagagtaatagtggcttcataaaatgagttgggtagagtaccttctacttctatcttgtgaaaaagtttgtgcagaactggaattagatcttctttgaaggtctgatagaactctgcactaaacccgtctggtcctgggctttttttagctgggagactatttataactgcttctatttctttaggggatatgggactgtttagaaggtcaacttgatcctgattcaactttggtacctggtatctgtccagaaatttgtccatttcgtccaggttttccagttttgttgagtatagccttttgtagaaggatctgatggtattttggatttcttcaggatctgttgttatgtctcccttttcagttctgattttgttaattaggattttgtccctgtgccctttagtgagtctagctaagggtttatctatcttgttgattttctcaaagaaccaacttctcgtttggttaattctttgaatagttcttcttgtttccacttggttgatttcacccctgagtttgattatttcctgccgtctacttcttcttgggtgaatttgcttccttttttttctagagcttttagatgtgttgtcaagctgctagtatgtgctctctcctgtttctttcttggaggcactcagagctatgagtttccctcttagaaatgctttcattgtgctcccaaaggtttgggtacgttnnnnnnnnnnnnnnnnnnnnnnnnnnnnnnnnnnnnnnnnnnnnnnnnnnnnnnnnnnnnnnnnnnnnnnnnnnnnnnnnnnnnnnnnnnnnnnnnnnnnnnnnnnnnnnnnnnnnnnnnnnnnnnnnnnnnnnnnnnnnnnnnnnnnnnnnnnnnnnnnnnnnnnnnnnnnnnnnnnnnnnnnnnnnnnnnnnnnnnnnnnnnnnnnnnnnnnnnnnnnnnnnnnnnnnnnnnnnnnnnnnnnnnnnnnnnnnnnnnnnnnnnnnnnnnnnnnnnnnnnnnnnnnnnnnnnnnnnnnnnnnnnnnnnnnnnnnnnnnnnnnnnnnnnnnnnnnnnnnnnnnnnnnnnnnnnnnnnnnnnnnnnnnnnnnnnnnnnnnnnnnnnnnnnnnnnnnnnnnnnnnnnnnnnnnnnnnnnnnnnnnnnnnnnnnnnnnnnnnnnnnnnnnnnnnnnnnnnnnnnnnnnnnnnnnnnnnnnnnnnnnnnnnnnnnnnnnnnnnnnnnnnnnnnnnnnnnnnnnnnnnnnnnnnnnnnnnnnnnnnnnnnnnnnnnnnnnnnnnnnnnnnnnnnnnnnnnnnnnnnnnnnnnnnnnnnnnnnnnnnnnnnnnnnnnnnnnnnnnnnnnnnnnnnnnnnnnnnnnnnnnnnnnnnnnnnnnnnnnnnnnnnnnnnnnnnnnnnnnnnnnnnnnnnnnnnnnnnnnnnnnnnnnnnnnnnnnnnnnnnnnnnnnnnnnnnnnnnnnnnnnnnnnnnnnnnnnnnnnnnnnnnnnnnnnnnnnnnnnnnnnnnnnnnnnnnnnnnnnnnnnnnnnnnnnnnnnnnnnnnnnnnnnnnnnnnnnnnnnnnnnnnnnnnnnnnnnnnnnnnnnnnnnnnnnnnnnnnnnnnnnnnnnnnnnnnnnnnnnnnnnnnnnnnnnnnnnnnnnnnnnnnnnnnnnnnnnnnnnnnnnnnnnnnnnnnnnnnnnnnnnnnnnnnnnnnnnnnnnnnnnnnnnnnnnnnnnnnnnnnnnnnnnnnnnnnnnnnnnnnnnnnnnnnnnnnnnnnnnnnnnnnnnnnnnnnnnnnnnnnnnnnnnnnnnnnnnnnnnnnnnnnnnnnnnnnnnnnnnnnnnnnnnnnnnnnnnnnnnnnnnnnnnnnnnnncccgttcttgtattggattttttctgttatttacctttgaaggctggcattcgtggagagataatgtgtgaatttggttttgtcatgggaatactttggtttctgcatctatggtaattgagagtttggctgggtatagtagcctgggctggaatttgtgttctcttagtgtctgtataacatctgtccatgctcttctggctttcatagtctctggtgaaaaatctggtgtaattctgataggcttgcctttgtatgttacttgacctttttcccttactgcttttagtattctatctttatttagtgcatttgttgttctgattattatgtgtcgggaggaatttcttttctggtccagtctatttggagttctgtaggcttcttgtatgttcataggtatctctttctttatatttgggaagttttcttcaataattttgttgaagatgtttgctggtcctttgagttgaaaatcttcattctcatccactcctattatccgtaggtttggtcttctcattgtgtcctggatttcctggatattttgagttaggatctttttgctttttccattttctttgattgttgtgccgatgttctctatggaatcttctgcacctgagattctctcttccatctcttgtattctgttgctgatgctcaaatctatggttccagatttctttcctagggtttctatctccagtgttgcctcactttgagttttctttattgtgtctacttccctttttaggtctagtatggttttgttcatttccatcacctgtttgtatgttttttcctctttttctgtaaggacttctacctgtttgattgtgttttcctgtttttctttaaggacttgtaactctttagcagtgttctcctgtatttctttaagtgatttattaaagtccttcttgatgtcctctaccatcatcatgagatatgcttttaaatctaggtctaggttttcgggtgtgttggggtgccctggactgggcgaagtgggagtgctgggttctgatgatggtgagtggtcttggttcctgttagtaggattcctacgtttacctttcgccatctggtaatctctggagttagtagttatagttgactctgtttagagattgttcttctggtgattctgttaccgtctctcagcagatctgggagacagattctctcctctgagtttcagtgctcagagcactctctgctggcaagctctcttacagggaaggtgtgcagatatcttgtttttggacctcctcctggtcgaagaagaaggcccaaaacagggcctctctcagaagctgtgttgctttggcagttcccagaagctgtcaggttctgtggtgcagactctcacctgtgcagactaaattcctaagctccagggagtcctggaaccaagatggcgaccgctgctcctgaggctgaggccgcctcccaagccaggcggacacctgtcctctggtccggacggtggccggctgtctgaggcccgccaagggtgctgcctcagcggctctgtgcttccgcctgtcccagaagctgtctggttctctggcgcaccctctaacctgttcagattaatttcctaagttctgctgagtcccggaaccaagatggcgaccgctgctgctgaggctgaggccgcctcccaagccaggcggacacctgtcctctggtccggacggtggctggctgtctgcggcccgccaagggtgctgcctcagcggctctgttccttttcatcttttctgaaggaagaagttgtctgccaacgcttccctagtgatttatgctctgtgaagtctttcattaactttgtcaaatgcccgtttgtcattagaggtatagtgtagtactggcctcgcatatgcagggccctgactttaatccccaacactataaaaaataattacaagtgctaattggattctgtaggttacaataaaaagaaatgcatgaacatgggagggagagagatgtatttgggggtcagggtctaaagagagtggggtggatatgaagaatacatattgtatccatgtgtaaaaattttaagaataatttaaaatattcacaaaaaagaatggtaaactatcacttatgtttagttgtgttggtcataatgataacactgtatgaacaaggactaggtcttcctgcttgctgtttggctggataaaaagcctggtctctgggtgccctcaatgcctgtgagaataaactactatcatttatattatgtaaaaaagttttagaaaagatacggttggccctgagtttttgattactggaagaaggctgtcagggcagcttgacttacaggtgaacagcgttggccacccttgctctaattcttggtctcttctctctcttcaggtcactgggctgttgtgagagaagggctcacaaacccttggattccagataactggtcctggggtggagtcgcttctgaacattgccctgtgcttgctgaattgtacatggaaaaggactggagcaagaaggaagtccccaggaatggcaatggagtcaccttagagccaagtgaagccaacattaaacatgagcgatgatgacatcactctttcccgcctctgacttgggagagcataggatggagatggcactacagggtgagaagatccagggcctgtgaatcatcattctgaggaccttagtcttggtccctggaccactgtccactttgtgaacactttagaacctggcctgaggggagcctgtcaggcactggctatggtgggcatcatggcggagctggctggaactgcgacgtcttgacgctatgtagctgagttcgggcttgggatgggggctgcactgctggctgattgtttagcagcatgagaacagtaacagaggagtgaagtgcagatgggaacagtggctcaggctgacaagcagtgccacagctctcgtttctgcctcaccaggatgtcatgttctaccgacaaatttcaggaagcttttaactgtgatgaatgcacttctcaaagatttttagttttgttttgaaaaaagaaaagaataataaacagattaatctgcctggcttcagtcagagtgtggaatggtttgctttgctctctcaccttagttctgtgggccatggctacccaaatgcttttccttcccctgcccgttttatgtccctacctttctgggacactacaaaggtactcctcacatgtctgtcatccctattgtctcccccttctcagcttctccttcatttatactttgatagattttctcctgggaggaccacttagcttcaggactttagtgtagcgtgtgatcgataccagaaagacttatctccttgcaccgtccccatacactatattttgagcttaggcttcctctcctgactctgaggcatacatggtctttgtatcagcgggtcctgcacttagagatccagccagacacagaaaacataaaatattaaattgtgtgtgctgaacaaatagagttcttgtcattatctcctaaacactatggcacaacaattgttctgtaggacttacgtcttgttggatgtcctcggatctggatggtttaacatgggtgagatgatgtacataggctgtatgcaaatactatataccattctgggtaagggacttgagcatacttagacattgtgtttcggaagtaagtatctgggaaccagttgcctatggattctaaggaatgatttctgattcaggatatgcaggaggataaacctcagtgtatcactgaattggtgggggatcagaggtctgtgggaggctttggagggccagcaaggacaggtgaactctgagccagagacggggttgggttgatctttaggcatgtcatccttctattacagcaactccaggtttatactgcccatttcatggctcctgacagtcacgcaagcataaactaaaggggtccaagcccagggtgctctgaatctaaaacccagtcacaatgtcagctccatgcttagcatgcatgcaccgttataaaaataaagcgtaagtcatagtcttatgttctctaggtcattccagtcttctgtggaagcgaacagtttatcactttttccacaccaagtacagagtgggcccaaggtggagaaactgccactgtcaccaagcagttttgtcttcaacactagtgtgtcaacttttttctggagtgatgtgaacaaatgtgtgttcaccaatagcaggccgaagaatgattctacccaagtctagcttggtgaaccagtgcctttaatttactttataaagaaacatggaaaacttataagcagctataccaccaaagaaaagctcctttccagccattattaattaacctgtaactctggaagggatggagcctcctttgaggttttatatgttgcctctgagtaggtcccttgtgtgctgccttgtatagcttgtgagccctccccatgtgagaatgttagtgtgtccagtcctgtgaggttcccatgagggaatgttaatgtgtccagtcctgtgagggtcccatgagggaatattagtgtgtctagttctgtgagggtcttgcataagcaatcatagcactgtggtgtcagagtagcagtggccatgctatgccaacattctgcagtaggcctgatgtaataggctctggggctgcagatacatcgctggtggttttgcttctgacatcagggccccaggatcttagcctgtacgccattgcttttagtcccacttggtttgggttctgattttgactaatttattctaatttttaaaattaataaacttcaattttaggagctatttttaggacataggaaaactggtgcaaaatatcaccctcaatttctttcacaacagggcaatttgttgtatttgctgtgccaacaacggcatattactattgactaaagcccatagtttacattagattcactctcttgtacgccccatgccttttgacaagcatccatgtgcccctgtgttaacagtgagattgtgttccagttaaactccggtataaaaggtagaaatagctgttgtcttagagtgataagacatcataattgaaagcaaatccaggaggaatgagcaagagtgactgaggacaaccagataccctcctggcccttggtttccctcaccgctgctctagagatacaaagaaagcaaaagcaatccaagaccctcagacagacttccttgagtttctttgatttgggcttgtttctccttttgtgcataggtgagataggatggaaagacaggttatccaaacacaggcgtgaaaaggaggcactcagtctgaaatctcattaacttgttttgctggctaagaatcaaggattcctgcacaattatttgttatgaggattgccaacacagaagaaataatttttaatgaaaatgttaacatagcaagaagtcagctttaagacatgaatgtgtgtgacctcgaggggggcccccactctcttaagtgttttctggaaactcagcacaactattaactgttttctttttttttaaacaataagaatattgttaactgttcccgtttcgcccataagcatcctagcaggaatgaagatatgctgaggagatgtttgtgcctttggggtgggggagggggctattgaaacaatggacttctcaaaattagaaatttcccaggagtctcatgctagcaggaggaaaccactgaagcctggtgccagccagatagggagcttgtctcctgggaagagatttccagcatgccataccaacctgcagactggagctaagacagtaatgggaccacaccttgactgggacagcttaatcggaaattacccttccctgctacttttatgttaggatcctaaaactggacaatggaggtaactagatttctttgctcccttttccagtgtggctgcatcagttatctcctttttttttttttttccttttgctattactttgtatcttcaagaggtttatggagggcagttgccaagtgattaggacttcttggccccaggctctgatcctcacatcttcagtacccatttttgtgaggcaagcaggaggtgaatacatatatcccaactactctggtaatgcctgggtccttggaagctaaagtttcacctattagtttaatattgccagccacaccctaggatctcatttgaattgcttagcaacatgatgaactgtaaacactacccacttcctagggatgatgaagacaacaaagttacaaatccatctgagatgcctgcatccatgctcttgggtgtgtcttctgttgcttcctcaagggcagctcttactctcagcttgtttctaatctgttaggaatacattcagtaaactccaactataccttctacttgctcagcttgaaattcttttccgtactgaaaccaaggatctgccttacctgaggtgtgctttctaagaggtgataggactagatttgcaatcagaaccctgaaggaatgcagagacaggaaaaccagatgcataaaaagagtacagctcatgatctggaccggcatctgtaatctagccttaaggaaggacccctcatctcaggggcagcacagaattctaagagctggggacaaaatgctgagagatccgtgcctgaacccagtatcaggccagtgtgttttcacattctcacccctgtgcatctcccctcagcccccatttcattgccatttgtttacgtctggtgtaaatttagcaggttcttggtcttttttttttcttccttactccatttcattttctcactcaaagaacatagagtggtgtgctttacaagttctctgtggctcagacaccatagagatgatagagatctttatgttatctgatggtttttatttacctcttcaatctacctttaacccaagctccctcctcctcctcctgacattctcctttctacttatattctatttcttttctgtcaacacagtgtcaatcattattcttactttgcttgattctttgcattttgtttccaaacgcagagtaacttatatactggttacaatttctgtccttttgcccttcaaagtaattgctactttagagaaaatggtgttttagttgactcttactctgttttcacagtagatctactcctcagtagttactactgttgcagagggtagtctactctcaagagagtactatagcctgttaccccgaacacaagtctaacagaagaaaatggcacctcaaccttactacaacctgttcctttgttatgttatagagcaaagccttcccttggatagaagaaaagcagctaagtaaaaacaaacaacacaaaacaaaacagcaaaatatctaccaacctgtgcccaagttcagatatgcaagtcctagtgcaaaatgcaagtagcatgaaaaatcagtacaagtcttcaaaatgaccacacaggaagtaaatggccatcaagttgagtgacttagtgaaactcttggagaattcaaaagaatgataaatgatcataactgtgtccgagagaatcaaagaggatgcaacaagctcttcaataattttcaagggaacaaattacagctgaatagaataaagaagccagcacaggatagaaaaatggaattcaataaagagacagaaattctgaagaaaaactgaactaagaagctaaaggtaaaattcaataagtccaataaaaagctcagtgggaagcccctatcacagacacacaaggaagtcattgtgctagggacagaagacaaagtagagggattgtaacatgcagtcaaggacaaaggtaaatgaataaaagtgcttgagcagagaatgtaagactttcagcatactgtaaaaagacatatgggccaaatgggaggaggtgaagaagggcagaaaggaagaggaggaggaggagaagaagaatatttatactaaaagcatggaacgtatggtcaataaagaataccagaaaaattcaaatccaaggaaagttattggaatccagagaaaagtatatagaactccaaatcagacttttaaaaaaaggaagaaagaaagaacaaaagaaaagaaactccacatcatagttcaaacactattcagaacacaaagctgtactgaaaactaagaaacatcacatggaaaggcaggtccatgaaagtaacagctgattttttttttttttttcccagcagaaactttagaagccagaaatgtgccggcgcttgcctggccagttcagaagtcagagaggagagtggatctccatgagatccagaaggcagagaggagagtggatccccatgagatccagaaggcagagaggatctctatgaggtccaggccagcgtaatttacatatggagttccagactaggcagggatacataatgagacctcaattaactaattaaagtaaataaaaattcagatgtgcttgggacagtatattttcaattctgaaacagtacagttgccaacccagactactatatacagcaaaataaccataattgaaaaagaaggaaaaacttgccatgataaagatagataaagggatttgtaatttcttcagtagccccagagaagatactggaaggaatttttcagacttaagaggaaagataaacacattaaacaagctgcaggatagaataaatcagtagaatagtaactaatcctaatgaaaactaagaaaacaccaaaaaaatagaagccataatattacaagaattaaaatttactatttaataataactaaataacaatggccttaatttttcaaattaatagatacttaggagaagaatggattataaaagaagatccatctactagttaactcaatgataaatgttccaccatcaaagacagacggtgtctgatactgaaaagatgaaaacacattttttttaatgtatgaaatatttaatttattttttaatctttttattggttattttgtttatttacatttcaaattttggcctcttcctggtctcccttctgcaaatcccctaccacccccctccccgctgcttctatgagggagctcccctacccaaccacctagccattcctgcctcaccacccaagtttccctaaagcatcaagcctctacaggaccaagggcctctcctcccactgatgcaagataaggcaatcccctgctacatatgcagctggagccatgggtccctccatggtgttttagtccctgggagctcttgggggtctggctggttgatattgttgttcttaatatgaggttgcaaaccccttcagcttcttcagtacttcccctaactctacatttgggtctatgtgctcagtctaatggctggctgtgagcatccacatctgtattggtcaggctctggcagggcctctaaggggacagctataccaggctcctaaaagcaagcacttcttggcatctgcaatagtgtttggcattggtatctgtgggtgggatgaatccctagtctctggatggccttttcttcagtctctgctctactctttctttgttcctgcatttcctttagacaggaacaccggagaaccaaataaccctattaaaaatggggtacagagctaaacaaagatttctcaactgaggaatctcgaatggctaagaagcacttaaagaaatgtacaacatccttagtcatcaggaaaatgcaaatcaaaacgatcctgagattccaccttgcaccagtcagaatagctaagatcaaaaactcagatgacagcagatgctggcaaagatgtgaagaaagaggaacactcttccattgctggtgggattccaagctggcacaaccactctggaaatcagtttggcagttcctcagaaatctggaaatagttctacctgaggagcaggagtcctgctcatatacccaaaagatgctccaatatgtaacaaggacacatgctccactaatttatattagccagaagctggaaagaacccagatgtcccaccacagaggaatggatacagaaattgtggtatatttacacaatggagtactactcagctattaaaaacaatgacttcatgaaattcttaggcaaatggatggaactagaaaatatcatactaagtgaggtaacccagtcacaaaataacacacatgttatgtattcactaataagtggatattaggccaaaagcttggaatacccatgatacaactcacataccatatgaagttcaagaagaaggaaaaccaaagtgtggatgcttcagtcctacttaggaggaggaacaaaataatcatgggagggagaaggagggatgtacctgggagggggagggaaaagggaggacagtatcaggtgtgggaggagactagggagaagtacagagtcaggaaattgaacagaggtgtatagtagtgggggatggggagctgggggtagccactagaaggtcctagataccaggaaaggaagaggctcccagaacccaacgatatgacattaattgaaatacccaacaaaagggagagagaacctgcagagaccatatccagaggttaggcatggcccccagttgagggttggaaaaacacattctaaaccaatgaaattaggaaatgaacagacatttttttattgttttatttatttacattccagcattgtttccctgcccagtcccccttcccacaattcctcaacccgttcctcctcaaacttgccttggagagggggttccccactctgtccccccaccaggcatctatcttccctggggcctcaagtttctcaaggattaggtgcatcttctcccactgaggccagaccagacagtcctctgctatatatgtgccagggaccttggcttagcccatgtatactgcctggttggtggttcagtctctgggagctccaggggtctgggttagttgagtctgctggtctttctatggggttgcccttcccttctgcttcttcaatcctttccctaattcctccatacaggtccccaattttagtccaatggttgtgtgtaagtatctgcatctgtctcagtcagctgctagtaggacctctgagggagagccatcctaggttcctgtctgtaagcatatctgtcttagttagggttttactgctgtgaacagacaccatgaccaaggcaagtcttataaaaaacaacatttaattggggctggcttacagattcagaggttcagtccattatcatcaaggtgggagcatggcagcatccagacagtcatggtgcaggcagagctgagagttctacatcttcatctgaaggcatctagtggaagactgacttccaggcaaccagagtgagagtcttaagcccacacccacagtgacacacccactccaaccaggtcacacctattccaacaaggccacatctccaaatggtgccactccctggtccaagaatatacaaaccatcacaatatcatagcatcagtaatagtgtcaggccttagtaccctctcaccccaccccatgatatagatcccaagttgggccggtcactggaccactttcttcagtctcttccccatttttatccctgttgttattttagacaggaataattctgggtcagaaaatttgactgtgtgttggtaaccctgtccctccacttgaggccctgtttatctactggaggtgggttctttgagttccttctgtcctaagaatctctcatgtcccaggtctctgtgactttctagagggttcactttacctcacactccctgaggctgcatatttccattcattctcttggccctctggttttctcttctgtcccccaatacctttttactgttaaaagtgatatataggaaaccaacagccaacatcaaattaatgaagagaaactagaagcaatcccactaaaatcagggccaaggaaaggctgcccattctcttcctatctattcaatatagtacttgaagtgctagctagagtgattagacaacaaaatgagatcagggaatacaaattggaaaggaagaagtcaaagtatcactatttgctgataatatgatagtatatgtaagcaccccccaaaattgcaccagagaactcctacagctgataaacaacttcagcaaaatggtgggatataaacttaactcaaatcaataaccttcctttatacaaatgattaacagtctgagaaagaaatcagggaaacaacacccttcgcaacagccacaaatagtataaaattccttgttgtaactcttaccaagcaagtgaaagatctgtatgacatgaacttcaaatccctgaaaaaagaaattgaagaggatctcagaagatggaaagatctcccatgctcatggattggtaggattaatatagtaagaatgaccattttaccaaaagcaatctacagattcagtgcaatctccatcaaaattccaacaaaatggagacatggagagtgcaattctcaacttcatatggaaaaacaaaaacaaaaaataatcccagatagccaagacaattcacaaacagacatttttgatctaaaagagacttcaaaccaaaattagaagacataaagaaggccacttcatactaattaaggaaataattcgctgagaggacataataattctaaacatgcacatcttaaacagcagtgcatctaatttcataaaacaaggttaactagatataaagtcacagataatcccatcacaataattttgggtgacttcaatattctactctcaccaattactaatctcatacaggaagtaaacaggcatatgtattaagttacatcatagagcaaggggacttgagaacattctgtccaaccactgcacaatatagatggactttattcattttggcagtccatgatatattaataaaacacatcatatattagtatacagaacaagtgtcagttaatatagaaaaactgaaataatgacttttattcttcctcaccatactggagagagtaacaaaagagactacaggatatacacgagccagtggagattgaataactcactattgaa

SEQ ID NO: 1085 - DNA, 2667 bp, Mus musculus
cagctgtgacacccacggcgagcggccgtggtggcgcgcggcgcgaggttcaggacgcgctccgccgcctctcgcacccgagttaggcgccgggctttgcctggattcaagcagctacgacgcggctagtcctggtgcagcatcgggggccgaatttcgccgcggctactgtcgctcaggagcaattctgcctgctccgggaaagcggcactgagagtttccctgggagaaagaaccgggacgcgcgcgtagagccacaggggaccgggaaccgatccgaccgagcggcggagaggtggcccagcaaaaggtaattttggacactagccatggaagatttgatgtttgtctgcagcaacttcctcgacccttaagtcctgtaacctcccgttcttttgtgcctatcaaggctcccgggtttcttctctatccagagttattctgttgtggttggccatggggagcacactgggctgccatcgctctatccccagagatccctcggacctgtcacataaccgcaagttcagcgctgcctgcaacttcagcaacatcctggtgaatcaggagcggctaaatatcaacactgccactgaggaggaactgatgactctgcctggggtgacacgtgcagtggcccgaagcatcgtggaataccgagaatatatcggcggcttcaaaaaggtggaagatctggcacttgtcagtggtgtaggggccaccaaactggaacaggtcaagtttgagatctgtgtgagcagcaagggtaactctgcacagcactctcccagttccctgaggcgggatcttctggctgagcagcagcctcatcacctgaccaccactgtgcccctcactcctcgagtcaatatcaacacagccacccttgctcagctcatgagtgtccggggcctcagcgagaagatggccctcagcatcgtggactaccgcagggaacacggtccttttcgaagtgttgaggacttggtgagaatggatggaatcaatgcagccttcctggacagaataagacaccaggtgttcgcagagaggtccaggcccccatcaacccacaccaatgggggtcttaccttcactgccaagcctcatcccagtcccacatctctgagcctgcagagtgaggacttggacctgccaccaggggggcccacgcagattatctccatgaggccctcggtggaggcctttggaggtatgagggatgggcgacctgtgtttaggttggccacgtggaacttacagggctgctctgtggagaaggccaataacccgggggttcgagaggtggtgtgcatgacgcttctggaaaacagcatcaaacttctagctgtgcaagagctgcttgacaaagaggccctggaaaagttctgtacagagctgaaccagccgatcctgcccaacatccgcaagtggaaggggtcccgaggatgctggaggtccattgttgctgagaagccttccaatcagctccagaagggcccctgctactctggattcctatgggacacagcagccaacgtggagctgagagacatccccgggcgggagagctcacccagcaacggtcatgctaaggctgtgggccccagccctttcctcgccagattcaaggtgggaagtaatgacttaaccctggttaacctccagctgacagccctggccctcccaggagctgagaattcaagcaagaatcacagtgatggccaccgattattgaactttgcactaaccctccaggaaaccctgaaaggagaaaaggatgttgttattttaggggattttggccaagggccagatagcaatgactacgatatcctaaggagagaaaaatttcaccacctagtcccggctcacactttcaccaacatcagcaccaggaatcctcaaggctccaagtctgtggacaacatctggatcagcaaaagcttaaagaaagtgttcacaggtcactgggctgttgtgagagaagggctcacaaacccttggattccagataactggtcctggggtggagtcgcttctgaacattgccctgtgcttgctgaattgtacatggaaaaggactggagcaagaaggaagtccccaggaatggcaatggagtcaccttagagccaagtgaagccaacattaaacatgagcgatgatgacatcactctttcccgcctctgacttgggagagcataggatggagatggcactacagggtgagaagatccagggcctgtgaatcatcattctgaggaccttagtcttggtccctggaccactgtccactttgtgaacactttagaacctggcctgaggggagcctgtcaggcactggctatggtgggcatcatggcggagctggctggaactgcgacgtcttgacgctatgtagctgagttcgggcttgggatgggggctgcactgctggctgattgtttagcagcatgagaacagtaacagaggagtgaagtgcagatgggaacagtggctcaggctgacaagcagtgccacagctctcgtttctgcctcaccaggatgtcatgttctaccgacaaatttcaggaagcttttaactgtgatgaatgcacttctcaaagatttttagttttgttttgaaaaaagaaaagaataataaacagattaatctgcctggcttc

SEQ ID NO: 1086 - protein, 603 aa, Mus musculus
CLSAATSSTLKSCNLPFFCAYQGSRVSSLSRVILLWLAMGSTLGCHRSIPRDPSDLSHNRKFSAACNFSNILVNQERLNINTATEEELMTLPGVTRAVARSIVEYREYIGGFKKVEDLALVSGVGATKLEQVKFEICVSSKGNSAQHSPSSLRRDLLAEQQPHHLTTTVPLTPRVNINTATLAQLMSVRGLSEKMALSIVDYRREHGPFRSVEDLVRMDGINAAFLDRIRHQVFAERSRPPSTHTNGGLTFTAKPHPSPTSLSLQSEDLDLPPGGPTQIISMRPSVEAFGGMRDGRPVFRLATWNLQGCSVEKANNPGVREVVCMTLLENSIKLLAVQELLDKEALEKFCTELNQPILPNIRKWKGSRGCWRSIVAEKPSNQLQKGPCGFLWDTAANVELRDIPGRESSPSNGHAKAVGPSPFLARFKVGSNDLTLVNLQLTALPGAENSSKNHSDGHRLLNFALTLQETLKGEKDVVILGDFGQGPDSNDYDILRREKFHHLVPAHTFTNISTRNPQGSKSVDNIWISKSLKKVFTGHWAVVREGLTNPWIPDNWSWGGVASEHCPVLAELYMEKDWSKKEVPRNGNGVTLEPSEANIKHER

SEQ ID NO: 1087 - DNA, 168462 bp, Homo sapiens
cccttcatgcttttagagtaacagagacacaaataaggagaaattcatcacagagtggttcaacagtatttaatgctgtgtctggggcctcctaagatcctttttctcactaccattagatcacactctcgggatgccatacaaggtcttcatgactatttcttaagggagccattcctggaagtggggctggggtcagggaccagccttaccaggccttcagtcttccaatatttagaagaaataaggctaaaaaagaacgccaatggcaacattgaaaaggaatagatgcggaaaccagaaaaggcattgtgagattgagtagggcaggtgtcaacagcaaagtccagactgtagctgctgtcaggtgagtgtgaaggggaagcagagcaattgaggtttacctgctgttcctaggtatgtgaaagcctttccctccactcccaagctccaacaacagtgctcaattcttctggcctgtggtggggctgaaggagcctcctcaccccaccaccagaagtgtaggtccaaggacattcccctgacttgtcataaggtaagaatagttgcctcacttcctctcctgcttctgtattattttgtgcttggagaaggcttctgcttaggcacccagaaaccaaagtaatggacttcactgagaagaatatttcataaaccctcaaatccagtaaacaaaaaagaataaattgttatgtgaaaaagtgaaagtctgaaactaattggaaatgtcactttttagaggaaatgaataaagtgaatgggagcttaatttcctaagtgtgatggtgataatcatatcatctttaaagattaatgaatactattttctgtaataataaaagttttggaggtggagggacaacacagtgcctctgatggtaaatgttctccattttgttactgtaaatgaagctacctcgttttgttggggctttgccacaatgatctctggccaaatgcaccataagaaataaagtgttaattggaaaggcatttaaggtgtttgggaaatgacaaaggtcttcatttgtcagtcatgagatgaaaccctatattagtcagtagactaggagctctaaaggaggttcctgggtctcctgggaagttgtgaatgcaggtgcctgtttctaactggtatcaagctctatttcaggagcttatgctaagccattttataaaaccaaaacagatttaggtttgcatgtaagaataagtggaaactgtttttcctcaatatccatgtatctgaccagaagaaataggttcctccatttctgttagcagaaatgcttgcacaacccctcagcaaatatgctgaaacaccttaaaataggcaaatggaacctaaatggggacattttgttcacaactctttttagttatttcattatcatggaaatgtattgattaattctgttttaaaacttcattttgaaaaaaagaaaaccctgaaaaatatatacaatacacaatcttagtaggcctgtatctatttaagaaattgaatcaacaattaataattttccaaaacagaaagcaccaggtccaggcagattcactggtgaatgctaccaaacatctaaggaaaaatttataccaatcctctagaatttcttccagaatatggaagcagagttaatacttcgtttacttattgaatgagaccagaactaccttaaaacacaaccagtcaaaaacattacaaaaaaggaaactatcaatgaatatctctcaattatatagaagcaaaaatcctcaactaaatattaacaaattgaatccaacaatatatagaaagaattacataacatgaccaaacaggctttaccctaggcatgcaaggctgattcaacatttaaaaaaatcaatggatgtagtctattatatcaacaagctaaaaaaaagaaaaaagaaaaaagaaaaatcacatgatcataccaatagatacaaaaaaggcattggacaaaatccgacatccattcatgaaaaaaacagcaaactaggaatagaggaggatttcttcaacttgatatcgaacatctacagaaactccacagataatgttatatttaatgttgagaaactagaagctttcctgctaagattaggaacaaagcaaagatgtcctctctcacccttccttttaaacatggtactggatgtcttagtgaatacaaaaaaaacaagaaacaataaaaggaaataaagggtatacagatttggaaggaagaaataaaaactttgttcacagatgacataattcctatatagaaaatccaaaacaattgaccaaaaaaaagtccttgaacttctaagcaactaaagcaaaattataagccatgaggttaatatacaaaactgaatccctttcctacatgccagcaaagaacaagtggaatgtgaaatttaaaacacaataccagttacattagcactcctcaaaatgaaatacttaggtataaatctaacaatatacatacaagatctatatgaggaaaaaacaaagctctgataaaagaaataaaaaaagaactaaataaatggagagacattccatgttcatgaatagaaagactcagtattgttcagttcttctcaactttatctatagattcaacacaatcccaattaaaaatccagcaagttattttgtagatatcaatgaactgcttctaatgtttatatggaaaggcaaaagacagagtagccaacttaatattgaagaaaaagaaaagttagaggactgtactgtctgacttcatgacctactataaagctacagtaatcaagggagtgtggtagtgccataagaatagacaaataggtcagtagaactgaatagagagcccagaaatagatccacataaatatagtcaactgatccttgacaaaagatcaaggacgatacaatggagaaaagacagtcttttagcaaatcatgctggaacaacaggacatccaaaagaaaaaagaaaaaaagaatctccacacaaaactgacacctttcataaaaaactcaaaatagaccatagaccaaaacataaaactataaaactcttaaaagatagcacaggagaaaatctaggttggatttggcaatgacttttcagatatgacacaaaaggcatgatctatgaaagaaagcattgagaagctggactttattaaaactaaaaactgctggttggcaaatgacactgaccagagaatgagagataagacacagggagaaaggatgtacaaaagagatatctgatgaaggactattattccaaacatacaaacaactcttaaaacttaacaaaaagaaaatgcacaacgtattgaaaatgggcaaacgaccttaacagacacctcaatgaaaaaagatatacaaaaggcaactaagcatatgaaaagatgctccacatcacatgtcacctgggaattgcaaattaaaacaacaataacatggcactttacacttattagaatggccaaaattgcaaacactgacaacaccaaatatggagtaacaggaattctcattcattgctggtggaaatgcaaaatggtgtagccactttggaagacagttggcagtttctcacaaaactcttataaaacatgcttttaccatatgatccagcaatcacattccattgtatttacccatggtaacactcttatatgtctattgagtgtgaaaactttctcacaagaaattcttcatcctcctgcactccagtctgggtgaaatcctgtgtttaaaaaatgaaagaaggaaattcctcatcctcaacacaagcaagagaggctcctagagtaaatcatgaagaatccaaaaatgaatgtagagcacgaggaggaaaacaactgtccagccactctctggctataaggaccctgagcagactgaattgatggtgtccataggtcatacctgaaaagggattcaggatccttgcagcaccggaagtacaatgaagtactggccacccatctgctcccagcctacaagagatccaagctggagactataccacagtcccaaatcctccctccccaccttcagctgatcccaccaccagctgcactccttccccatccacaaagtgcagcatggcatctcagccaactcaaagcagcagaagtatagcgagcctgctattcccattttaaatttctgtgctgtaaatagtcaaaggagcaacaaagaaatcagaggcctgaggaggatcgggaggcagggcggaagccatcaacacagccagcctgcctgccagtcccctccctagcctgcacccccgctgcacaaccccctagcgaggccctgaggccttcccctccacccataccccagcagcagtagtggagccccaaatggaaccaacttcctccagggcatctcctacagaggaaactaactgcacactgggcagcttggacagctgcaggaccagtagaatttgccctgaggtatgacccagcctttccctatggaaacagccagggctagcaggggaccacggggaagttcttcaccttcctctgcaggcacttgtgtttcaggtcagccagaaagaaccagcatgaggctgaaagcagagtgcagacagcaaaacctcaggtggtgggcagcagggcaagactgaacactatacctacaggaaagcgtgtgggaaggtcaagctggctcccggcactttccatgcaacagggaggtcctgagctccagggagcccaaggagatggggcaggagatggaccatgctggaggcaaagagctgcaggtgggagggagcagaaaacatgcactgctgtgcatggcccacctggctgagaggacctcatgcagtggaggacgcaggtgtgcaagctgctcagcgggatcaaatcaggaggaaatcccatacctccctggctttcaaaagcattgtccccaagataagtgctgacctgaaaagtcggccaggagcctcctggggaacaagaaaggagggtggcccctctgccccagtgagggaaactgcagagactggactgcttccccaggggctcttcttccttcctgtgctcctctctgtcttgtcttctgtatttactgggaagaggagatggttctatggaaataaacaaacacaatcaacagataaaaaaatatatatgccaattcattatatttaaatgcaatagttaaaaaaaaaccctgctctatgactacagctgtcgcaagacaattgtctacaactgtccaaggggagggtcctgaacccttgaaaacactcttatgatccacctgaaaaacgataacaaaaacactatcctcaatggaaaccaaggcctgcaagagcatcccgagagtgggacaactgtcaatggctataaaggggtcttccccggagctgtggcatggctcttcttgctgagaaacaaggcctgagggccacatctgtatgataaatactgctctgagacaatctccccactgtgtataatcttaaaacaaccccagtgtattctctctcatgtcctgtgggtggctgggctcagctgggtggttgctcagctccttgtggtctctgctgggctcactcctgtgggcacatccagctgggggacaggctgggttgcaaggtcctagaggattctctcacactcagaggccctggtgctgcttgagggctggggtgtctcagttcttcttcctgtggcctctcagtcacaacaggagagttaatacttccctatagcatggcagctgcgttccaggagggaacattccacaaggaatggactagtacttgtctctgcttgccttactctcacaaatcacatggctaagcctggagtgaatgtagaaagaggtcacacagggaggagaatgaggggaggctggacccactgggcacccatgtacagtctatcacacactgttatgcagcagagcactggaatcctttagagtaatatacgaaaatgctcctggtggtgggattaccggctgagtgtctatatacaggcacagaagagaaagcagaattacatacctgtgtgtagaagatgaagctttgttcattgcccctctccatggtgtctgtccatggtgtctgtctggccatcctctgccacaactcccagtgaggcaggatctgatgtagaatgcgcaagtgggctgccaatgcctggagtttcctgagtttgggaacacagggagcctactctgataaagagggacaaatccactgttaaggtcacactaaaggagacgttgccttgtcacactgatataattcaggacagcatccagcttggccactgcacacaagttggtgccaagtcaatagcctgactgaagctcattgattggggcattggggcttgctttgccaggactgaggtcttgtgtgttggggcaacatttccctattcagctttcaaatctcatcttgaccctcacttcccgggaagtcccctagcagaaattacttgtaattcacatccatattctcttcctctcccttatttcaacaggcactagtcttactgatttcatgtctgcagtcctgctgcaccatcagctccgggaatagaagagtcaggagtgtgctcctcactgtacctccagtgcctagcactatgggcggtaaaattgaaaccacaaatgctctcccttcttgtcatctgccacctctccctttccctaaatcgccatttactttaaaactgctaactaagaagcaaaaggccaatgaccttggtcctctctgaccaggccccaggtgagaactatgtcgtaaggggcagtggccacaggatgtggtatttggctggaatgatataatttctgccctttgacatcgtcatgtaactgggttgtcagctagagccctaaataataaaatgcaaataaaaccctcattccttgtaaaatgggacccgagccaacttcccaatctcaatgaggattcttgaaagtcaggtatttccctgggtctcctcgtattctgattttctgcttccactgaatcctggctctttctcccacccatctttcatattttagctgccctttttctctctgtctttaatttacccagaaagattcagctcccttactttatctctcctaaacataacttattgatggccattacatacatatcttacaaaatttagtgtctgtgcatggggtaggggtgggaggattgcatcatgaaatagcacagcagataaaatagactgttagccgtaagtttaaaggcctctgtcgcccactttcctgagcccccaagccaagctggggaatgttctcttctgttagctgtctgttcaacttcttggatcccttcatccccctcctaaaccttttcatctccacccaggctcacgtaccccactctccccaaaaacaaggcctatgtttttttagattcagagaaaattttttttcattttttgaagattttttccaaagctgttgtcactgaagtacacccaaatgcacatatttaaagtatacgattctgtcagttttgacattcatatgcccatgaaactatcacctctcaaactacattgccatcagcccccaaagtttctttgtgccctttaaaatccattcctccctccccatcatccccaggtaaccactgatctgctttctctatatgtatgtcagtttgtattttctggtgttttatataaatagaatcatacagtatgttcttttttgccttgcttctttcactcagtataacgattttgagacttttcaatgtcatgtaatagtttgtctttattgctcagtagcattccattgtatggatatactacaatttattcattcatccactgatggatttgagtttcttgttgttttgctttgtgtgtgtgtgtgtgtgtgtgtgtgtgtgtgtgtgtgtgtgtgtgtgtttggctataacaaacaaagctcctatgaacatccacattcaagtctctgggtttcatgttttcctttttctttggtaaatacctataagtagattggttgagtcatatggtaagtatacgtttaacttcttaggaaacttccaaactgatttccaaagtagtggtgccatcttacacctccaccagcaatgtatgaccatttcaattgctctgcgtcctcaccaacattggatacaatcagtcgttttaaagttaaccatctcattgcatgtttttgtggggtgtatgtatgtgtgtttttaaatgcactttggtttggccaacgcttggtttcatttataccaaggggagcatttgctaggtttatggggaataaaaccagattatttctgttgttctaggatattattaatagagtcctctcttcacctccaaagtgtcctggtttgtatgataaaatatgttttctctgcttccagcccaagtagccacgctccacggctgtgcttccacagccacgttgcgcatcaaggcattctgctcaacgaagagttttctctgttttcctgcttgtcttaaactgttttttccttaccgcaccaggatttcagtgcgtggcataatgtagcccagtgtttgggtgggagatgatggtaggtagcaaggcatttttgcgatcaagtgcaaatagcttgcctaaaaataaagccaataaagagaaccgtggagccagagatggaggcagtcctgccatgtcctaatgaccccatcatcacttgggtcggatgcaaccagacctgaggtaagattccttaccttaacttttcaacaaggaaccaaaaatttccccccgaccttttttttttttttttttttttttttttttttttttggtctaagctagtttgacttggttttctgaccaatatacatagcaggggaatgtgcctcagaaaggcagtagcattttccaaacttgggctgccgctcattttacaaccaaagtaccttccgcctgtgagaggtactatttttgctgacccagtccttggaattgaaaccagatgcactggtcacattggttggggatgaaacttcagagaacactaaacgtccagggtcaaagtattcaacgatatcaccgcatgatttgcttaatcgaatactctagctctaggtatccactataatgcagagggctctttaatctttaaccaaattgtcatttagcagtgtgatgcaaaaactcttctgggttttgggaagcagcccccatttccctccttcgtaatgattagacttaatattacaaaaacttatccttgtttactcacagcgctaaatgtgcaaaggagcaaacctgtatttgacctatgcgaacacacaggagggtggtgcgtgccctctgctaggagcacaatgcgtcgctggcgttattagaggacatctctctgagcggagcaaaggtaatacactggtggaagaaaagaaaaggccgaaagtggggacagaaattaagacgatcccattcagtctcctctggaacgttctgcaaaattccgtgagaccctggacctacagcgatgcactctcagggactgccccggccttcatccccacacctcaaagacagacgaaaagcagctgagcagatctcgcctcgggcaatcctaaacagcctctaccaggcacaaccagtcctaggccccgggcggcaaccatggtccgggggcagctgacttaggacagcctccctgtgacccgccctcgccggcacggcgccggctccgccccttaagccccctaagtcccgcctctgcgctcccggggcctacccccgcgctcatggccccgcccccgcttttcctaccccatcgcgccctggccccgctcccacactctatgaccccgcctctcgcactccaggcccgccccacgcgctccagggttctgctctccacccatttgtgccaggccacgcccccacacccatggctcctcctctcgcacgccagggccgcccctcgcgctctctggttcgttctccaccctcttgagccttgatgccgccccctcttccatggccccgcctctcccactccaggcccgcccttgcgctctcgggttcctctctccacccactggtgccaggcctcgccccgcgccagggcccctcccccacgtgccctcgggagtcccggggaggagttgccgcgcggaggaggcgtggccgcggtgcctgcggaggcgcgagcggcgcggcgcggcgcggccgggactttggctttgacaccgactgcgagcgggagccgtgcggctggtgctgggtctggactggctctggcggatccccgcccgagttgggcgcaggactttttgccggggtaaacgcaactgcggcggcgccgccgcaagccccggtgcagcctcggcggcgggtttcgccgccgctgccgccgcctccgagcagccctgcggcttctattcactctgggagagcgatgctaagtttctcccatagaaagagccgggacacgcagaccgaagcggcgtagtcggcttccagggcctgaccagtgacccacacccgcgcggacgcctaggctggaggcagggggcccgtgctgtcccgggctgggctcaggcttccgagccgcaggtggaagaggaaccggcgccccgcagagcggccgagaggtggggcgcggggacccgcggcaggtcgggtggggggtcgataagccccttctcagtgcccgctccggggagcacggacttcccaggttgcaggtagcgctgtgtcagatgcggagcgtgggggaggtggagtggccaccccgtctgcgcgagcccaagtgtgggtgacccaagtgtcagagttgagagaggcctggaggagaggcatgaggctgatggggataggtctcttcccaagagaagcggctcgtagcctttttggactccagtgtgataaaacccggacgtccctagaggagaatccacatgggcctagcctcattgtgcctgcgtttttaggggttcacgggcagccaccagtccccgactcctggttactaactctagcactaggtagggggtgctaatgcaaatttcttaattcaatgggtttctatgtttattgatttattttctaggcggccaagtgaaaggtaattttggacacgccaggcatggaagattcggtgtttgtctatagtaacctcttcagtccctgaatcctgcaccttccgtttttctgtgcttgtacggcctactgggcttcctccctagccagagagctcttctgcagtggtgcggccttcccgggagcctgatcctggcggaccatggggagcaccctgggctgccaccgctccatccccagggacccctcggacctgtcccatagccgcaagttcagcgcagcctgtaacttcagcaacattctagtgaatcaggagcggctcaacatcaacactgccacggaggaggagctgatgaccctgcctggggtgacgcgtgccgtggcacgcagcatcgtggagtaccgagagtatatcggtggcttcaagaaggtggaggacctggcattggtcagtggtgtaggcgccaccaagctggagcaggtcaagtttgagatctgtgtgagcagcaagggcagctcagcgcagcactctcccagttccctgcggcgggacctgctagcggagcagcagcctcaccacctggccacagctgtgcccctcaccccacgtgttaacatcaacacagccaccccggcccagctcatgagcgtgcgaggcctctcggagaaaatggccctcagcatcgtggacttccgccgtgagcatgggccctttcgcagcgttgaggacctagtgaggatggatggtatcaatgccgccttcctggacaggatccggcaccaggtgtttgctgagaggtccaggcccccatccacccacacgaacgggggactgaccttcaccgccaagcctcacccgagccccacttccctgagcctgcagagtgaggacctggacctgccgccaggggggcccacccagattatctccactcggccgtccgtggaggcctttggaggcacaagggatgggaggcctgtgctgaggctggccacctggaacttgcagggctgttccgtggagaaggccaacaaccccggggtgcgagaggtggtgtgcatgacactcctggaaaacaggtgaggacaggaaccaccatgggtgttgggtgtgaaggcaacttgtgcgtgacctcatctatggatgcaaatgaatggattcttttgcgggtagggagggtgcaagagtttttaatcaatgttcttgaagcctcagccaataccgtcacctgagaatgggctgtccttctgctccagaattttctgaatacagctgggcttgtgacccatgtcttgagtgtgagatatctgagactgattcataattttggggtaagcagaggttgtgtttttgttactgctttggaggatgctgggtctacaccaagtcaggcactcagagcatgggaactggtgcagtttcgcatgtgagaaagagctcattggattttgtttattaatgggagggaaaatcatatttgttccatcaaatatgcctatttgtgcacacaaaatcatcttaaaggccaagtatttgcaaacacatacaagtgtctatatttaccaaaatgctatgaatgaatcactctccattctttttccttatttaacctggagttggttttcagccctaaaattgtagcccaaaatgtgtgtaaccttttctgtgccatagccagaaaaaagcaagctgacgtgtgtgtgtgaaaattggccggattttccccatttaaaccaaagaaaagagtccagtaggataggccgttaccacagagcgtttatgttattcacaatactgctctctgtaggaatttctgttagcctcgtcataaacaaaaacaatattattttggcagtaactcctgctgttagtaaaatagcaaactgtataatgtaatcaggtgtgggaaagaaagaaatatttgtgatggtcccttccaggtcataagagctgtgatcctggacttgaggcgttttgccctgccacccaccaggggtgcagtgtttgtggctactcgttgatttcctttgcactgagttgttggtgaggctggcggcgggggggcagcagtttggtgacacgaagtgaactctcagcgggaaatcacagtgcatgatggcagatcaccaggaaaattagtgaggagaaaagcaggtcacaacgtttccttggcactgacccagtggcatgctctcatcactgagagagggactccacactgggtcagggaactggactggggagcccttgaatgctctccctgcactgctgtgtcctctcttttgcagcctaactcactccttctgcaaagtcttcttgtgcacaggtgagagctgtactcggcaccgggagatatttataaagaatggcttgataattgttctctttatccatagcagcatgggcgtgtgaatgggaaatgaggaggggagaggcaggaaagacaaagctgcttaattcctattatgctttctagtggctcaatttgggaggggggtgatggattaggatcaaaagttggtccagtgggactgaccaaccaggcagcccctgcctatttattatgtcagtggtttctaaagtgtggtcccccctggggaccagcaacatcagctactgactcagaaactttgtttctgtgttttaacacaccctccaggtggttctgatgcacactaaagtttgagaaccattgtactaggtgttaggcaatcagctgtccctctgtctcttggaagccccttcctctggcagggttagtgaattcatgcagaactttccaggtctagtcggccctccatacctgtgggttccacatccatggattcaaccaactgtagatggaaaatattcaggaaaaaaaaaagttgtgtctatactgaacatgtcgagttttttcttgtcattccctaaacaatccagtatggcaactatttacataacatttacattgtattaggcattctaagtaatctaaagatgaattaaaatatactggaggatgtgcataggttatatgtaaataatatgccattttatatcagggacttgagcatcatggattttggtatcacaggggctcctggaatcaatctctgcagataccaaggtacaactgtcatttttattttcccctttgattgttttgatcatccttataattattcaaccttgtgatattctttctgaccaagcgttgaggagcttattcatcttctaggacctatgaatgtgaagggtagagaataggagagtgagcaaagacggctggcctcagcgctggctccaccctgcagcccactgagcaggagacctcacgactcttgtccagtgtgaaggttgtcctgtttttttcttctttgggtttcctagagagatgatgatttgctgaagacattgaactactgtcgtcaggcaagagtacaggaaaagtttacccaaacccaccagggtgtagaagggatcacctgtaagtgactgggaaggtgacccgcaccgtcacattctcactcttggccaaatgtgttggaggttgatggttctctttgcctggtcacaatggattcagtattccagacactcctagcacattgttaatgtttagtaaacatgaactaatggactcagggcctgatccccttcagagtagggtgagtgctttgtctgtatgactgtcctagggtatcaaaagctgtcacagagtagatctcgtgtcctcaatgatagcagcacccattctccaagagctgtgtgttcgtcctgattcacagaaatctctcccattccaattgttcccgtattagtaagaggaaatacatttagtatgagcaagaatgggtgcaggtgatttctgggtggctcttatttacatccatgtatacctgtaataaaagagtttcctaacttttgggtatgccttcgtgctttctaacagctttcccatttacttgattttcctagtaagtctgggatgtaggtaacactgacttttattaatgattcttcatctctgggtaaggaaactaaaatcaagtaagttagatgacatgactctatcaggcagctccttagtgactcagctgggactgcgacccagaccttctcactttagacctatgccctttgcaagcatgctgtgttttgtaagcacgacacctttaacctgcctcttggttagacacccatcctctccctcatcaggcgcacttgctaaattgtgagccagtcacagtgtcttaaattaaatccattgtaaagggattttaaagatacccttaggcagttcctttgcaaagggaatagctggctgtgaatttgctttagtaggtgtgttttcttaggctgaagggtagctgtatgggatgggagttagagtcttctctttaaccttcttacagcatgtgtgagctataagaaactgttttgcaagtgaggcgtgaggtaggacagcattatttgataatcatacagtcaccaggagccttcagggatgccatgctggtagcacagaactgacaggtttcattagattattttgccaaatctcagtcttaggcaatactcttccttgttcggtatttatggaacaagattaaaggggaatgttcctgctaaatatgcttgcaaaatttggaggtagtccacatctggaatgaaaattggttaatatttcatttttacttatttattttttgctgggaagtcattctgttttgagagtctctttggttattgaaagtataaaccctaagggagctgaaagataatctccaaaagaaataagaagatttaacatcccacttgctcattttcccctgtggcctacataagaagagaacttgagtgtcaaagtctttagccctgtaatggcttaaatcaatttttttgccacatgtctgtgatatcaaagcacaaggtggattaatgcctagcaacaagcactgatagtgaaaaaagattttactttattagacttgattagtaggatcaatataaacatatcccatcttgtcatttgattcattcattgaaaaatatgtattgaatgtctgctgtgtgcatatataagctaatttcagggatcagcttggccctgttacttaccaaacttaagtcaatgtagattagtttgtgtggcccagcctcaaaacagtctagtaaacctagagttttggggcaggtcaaaaggagtgattgatacatggttgtatttttctcatatgaacaataggctcaccctgggaggttgaagggtgggtggatgcagccagacgtaacatctggggacagaatgcccatcaatcctcttaaagtagaaattgtgaaatccattttgacacttttggaaactgaggctctgagaggttaaatagcatctgtgtggccttcagaaatgtagatattggagtcaggatttgaagtttgtctactttcaaagcggagggattaggccagattaggcgtgtcttttcccaaactccatgcccttctgctgcctctgactcccagcccacccacatttcctccctgcctttggctggccaggtatcagggtcttggggaaaaggagggcttccctacaaccctgagattgtgtcaggcctctgggggcctctgttttttcccgtttttgttcctctaaaggatggggcttgaggccagaggtagagccaatccaaaaggcgtcagggctcctccacccagcccctcaagtgtgagtctgtgaccttgggcctgactccaagatcaagttccagttttctgagccaaggaactctaaggtgtttctaaatagaaagatggtcggtagtaagagtgttgtggatttgtaagagaagacagtgtgaatgcagggaacttccaatgtaggcagaacttagggtttatctcactaaagggaaaggtgtgacttttgttttacaaggaagctgggcccattttgggtctgattccaaggttctttgggagtttgatggtgttgattttcccaggggctatccattcctttcttattcactcattcacccatccatccattcattcattcagttagcagatctgtttggagctctcactaggtaccaggttctgtatcaggctctggtaataaagtggagaacaagacaaagtccctgcactcatggaacttctgttctaggaggaaagacaaacaggtcaacacacacatcaatcattacagatagtggtgcatgctgagggtgatggaggtgaggtgaagagaagcctatttagatgggggtcaaagaatgcctcagctgaaagctgatggatgagaagaagccaggcacggaagaagccagggaaaagaatgctccatggaggaattggcaagtgcagaggccctgagagtgctggctccagacagaaggccagagttctagagtggcgggtgggtggggccgcagagcaaggccaggccagatcaggtggggccttcaagacttcttgtaacagcaggaggaggccacagaaggttagaagcagaggctgaagaaatgacctcttaccagatagtctgactgctgggaggtggtggggggcggggcgtgcatggagagggtcctgggagttgagtgaagaagctgttgcaggattcaagctaaaggcaatgatctctggggagatggggaagtgggcagagatgagaagccttttagaggtaaaaactggcaagacttgcctatattgtggatagtgtgagattcagcaggtagcttgtttgaaatgctctgaggtttctatgagataggtgcagaggcatatataataagaaatcctggggctgacacacatgcctctgtattattttaacatgatgcaaggtgttcaccttacccttcccctcagccacagctgtgtcctgggtgtggggtcttacttaggtccatagcagatggagtatgaggccatggtctgccctcagcagatggggcatctgacaaggccacatattctcttcagcatcaatgacaaatagacccagggcttgctctggggactttaggtgactatttctatcaggagaggttcgcatacattcagttcaacattgagcagctactttgtgcttactacctgatgaggtcagaggcatgggcgcaggaagaccccactttgtggtcgggggctcaccgtctcaaggacatacacattcagcaggtatttccaggatgatgtgtgggatgagggaggatgtgaagcttgctaagagacctgagagcacagggacttggtcgctgtctgcttggctctgcaggtatgtgagacctcagcattcggtcagggatgaagggaaaggaccaagtcaggtggatgggtggttggagtctgagaggaaggagtgtagtggcatagtgacaattgaggctgaaagtcagcatccaccctcccccatgcacacacacggctgaggagggggaggtccgggccctccactgaggcttatgatccaaaatactcagacaggaacatggcagcctcccacacaaggctcctcacagtgagagaatccggtatacaaatgccaagcttataagcaggaaggtgtgtgtcattttaatttcaaaatgaccttccccagcctgggaaacatagcaagaccctattgctacagaaactttaaaaattagctgagtggggtagtgcgtgcctgtagtcccagctactcagaaggcccagaaattcaaggttgtggtgaactgtgatcatgccattgttctccagcctcagtgacagagtgagaccctgtctctctcaaaaaaaaaaaaaaaaaaattactctaccttacaaaggattttatcccagaattccctaataacaatcagtgtcagtaacaaataaaatgatacattttactgaaattctatttgctcatcatggacatcctggtttgtgtgtggtaatttatacctgggtagaatttcacactgatgacttctcatatcataacatccaggaaatgccacaaaaatgtcctgctctacctgacaggctgttagtcctcatcaaatatttaggaatcttagcagcttcctcaccctccttctcatgagtgttgtacacatgccaaagttcttatgtaatgtcttgattgacagcagccaaattgctgaactcaagtggctgggaaccctggagaggtgtgctcagagtaaacatttcattataaagggaagtgtggaatccttcttgcagactcttgaataaagaaagcctgggttggctgggcacggtggctcacacctgtaatcccaactttgggaggccaaggtgggtggatcacttgagcccaggagttcgagactagcctgggcaacatggtgaaatcccatctctacaaaaaatacaaaaattacccaaggttggtggtgcacacccatagtcccagctactcaggaggctgatgtgggaggttagcttgagcctgggaagtggaggttgcagtgagctgagattgtgccactgcactccagcctgagcacagagcgagaccctgtcttaaaaaaaaagaaaagaaagaaaaaaagaaaaacctggattttctttactgactacaattccccaactaatattgatttgttgtttgtttccaacgagcccttgtttcctgtgaattctattttggttcagccgttacctgattaagctgttaagctgggccttaaattgttttacctagaggctgctgtatactcctgaaatgcagtgcttaagcgacagtacgttgttcccattgccacatttaaggttgcacatgctttggatgttctacggatctgaagtcttgtttgctcaccccaaaactggagaataaaactagtactttgtctttttcagcttatgctaaaagtgggaggtctcaggtgggttgttgttttttaaaaaatatctatccaatatcctgtttaaaaaaaacacttctctagagtatattttctgttaagcaaattcagtctaattttttttttagcagtttatgtttcttgaatgggaaaaagccaatatttgggtgacattaggccttggtcttaactgccagtggtctcagggctccttccttcctttcttggtgggcagcctctgtggcttcagattattgtgttgttttatgggtaggtttttttttttccttttcaaagtgattcccaatcttttaaagttttaatttgaggactcatttcagatagcaaaatacttcatgtccctctactctcccttactcgatggtgtacttttagtgtccacttggtggtagaggttgtgctagaacaaaaacaatgataattaacactgacagttgctgtggctgagggccatagctaagttacagatacagaagagatggctcagcgaagctgagaaattttactgctttcggagggtggaacttggattataatccaaagtctttgcagttagactccaaagtttgatgataaaaagctcttctgttcaggctgggcgcggtggctcatgcctgtaatcccagcactttgggaggccgaggcgggcggatcatgaggtcaggagatcgagaccatcttggctaacacggtgaaaccctgtctctactaaaaataaaaaaattagccaggcgtggtggcgggcacctgtagtcccagctactcggaaggctgaggcaggagaatggtgtggacctgggaggtggagcttgcagtgagccgagatcatgccactgcaccccagcctgggggacagagcaagactccatctcaggaagaaaaaaaaaaaaaaaaaagctattctgttcagtaatgcttctcagagtagttgtatttcattcatcacccagactgcattctaggctagatgctttcttaaccagcttggcttgggttccctaggttatgatttttcgtaagtatactgatatataatgatatcatcatgtgtctacgaacatatgtatttgtcttagtgtttgtcttttcaaagtggagcaaggatatttgcaaagcaaactgattgcaggatactatattttttatgacttttctgtcttttataattgtcttaaccacacttattttgacagcaatttcttaaacaacttgctttttaagaagcttttcaagtatccatcttcgttttcttagaaacaacttatctttctgctcatgcttctatttcaccagttgacaaccacattttaggagatcatggtaatatgtgcaactgacataaacagtttaaggacaggcacagttgactctctggtaagcacatgatgccctactcacagctgatcaagccaagtgtactcattgcaccatgggcatccatcaacttgttttacaaagggaatggggacactttggtaggtcccttgagtggaggttggttaggataacatctattatgttttttaaaaaggttactgttgtacccacgttgtttatttaagctaaattcagtgtttgttctacatgtttattgtagaccccaacaggtaactgcaggtggttactgacctaccattctttcctctaggagattgactgaaaaagtcaatctctggagaagacagtcaagcactgagtaatattttggtcaatgatagatggtgtatatgttcccagaagattataatggaactggaaaattcctgttgcctggtgacatcttcatgatcctgatcccatgtaagcctaggataatgtgtgtgtgtcttagtttttaacaaaaaagtttaagaagtaagaaagaaatatatttaacagtagcaaaaaacttataaaggatataaagaaagaaaatgtttttatacagttgtactatgagttttaagctatgttattacaaaagtcaaaagattaaaaaatttaaaagtttataaagtcaaaatgttacagtaagctaagggtaatttattagtgaagaaagaaaaaacttttaatttagtgtagcctaagtgcacagtgtttattaaatctacagtagtgtacagtcatgtcctggaccttcacattctttcaccactcacccactcactcagagcaacgtccagtcctgcaagatccattcatggcaagtgccctacacagttgtaccatattttagattgtatactgtatttgtactgtacttcttctatgtttaaataccatagtgttgcaattgtctacagtcttcagtacaataacataccatgtaggtttatagcctaggagtaggctctagcatctaggtctgtgaaagtccactctgtgaagtttgcacaatgatgaaatcgcctaatgatccatttccttttttttttttttttttttttttttttgacagagccttgctctgtcacccaggctggagtgcaatggagcaatctcagctcactgcaacctctgcctcccgggttcaagcgattctccttcctcagcctcgtgagtagctgggattacaggcacctgccaccacgccccagctaatttatttatttatttatttatttatttatttatttatttttagtagagacaggttttccatgttgaccaggatggtctcgatctcttgacctcgtgatctgcctgcctcggcttcccaaagtgctgggattacaggcgtgagccaccatgcccggccctaatgatccatttcttagaacatactcccattgttaaacggtacatgattgtatttatgaagtcaagaatttgactcataaattgatagtttgactcaaattgatacattgtccaatttcccctaaaaaagtctcctgcaacttttagaaataaaaacaatgaagtcctagtgagcttttattttgatttaatacctgtgctagtcagcattttcttcagcaatgcagatgaactgctcggagaaccgatgaatactgtaaacggagagggattcaggcagggggatgggactagatggcttataaatacctttccaagttcatgactccacactgtcttttaaaaatgggctgaattgaattttaaagtctgattcttaaaatattaaatacatgtccacacaagtgaaactgcacaagaaactgtggtattacagtatacctttgctgaactcagtttaacgccaggcaagactgtttggagttgatttgtaattgtttgtgttatgttagtttggatgtctcctgaatttgtaacaaaaaatgcaagtagttgttagatattgttagaatttcagcttagaaaaggagttgcttctatcttttaaactttgagataaattttattaaaagcatttgaaattacaaaatggatgtttaagatattaccatttgcaaccacttaattgtgaaaatcaggaggccaggagaagtggctcatgcctgtaatcccagcactttgggaggtctaggtggaaggatcacttgagcttgggagtttgagactagccctggcgacatagcgagaccccttctctacaaacaaacaaacaaacaaaaaaacaggctttcttgtcattggtcaacctaggcaagataaactggatgaagtatgagaaatgagactgtgagatcacccataacccctaatttcaaatacaatatttgcattcattcaaactgctgtggtattttgattgattaattctgttagttaagattatatatttaaatatataaatttctttcaaatcacaaaagtcccttccaatcctgaggctttttccgcagagagggaaaatgatcactgttactaccaaatacccttgaatactgagaaggaagagtggctgttcctatagataagatgtgtttggtttttagggctgccataatgaagtcccacagactggggggcttcaaccacagaaatgattgtctcacagttctggaggctgggagtttgagatcaagacattggccagcttggttttttctcagtcccctttccctggtttgcagatgactgtcctttccctgcgtcttcacatggtctttcctctgtacccaaaatctcttcttatgaggtcaccagtcatatcagattagagcttaccctgatggccttcttttaccttaatcaactctttaaaggccctatctccaaatacagtcacattctgaagtactggggattagggcttcaacacaggaatttggggggacacaatttagcccctgacaagatcatttaagaaaaattacccaggggtttccttctgggcagtttgtgagcaacttgctcctctgagttttttctggagggatgacgatttcaaagtacttgtttcacagtttaaatgatagagaaagctgcatttgagttcctggagtgacacactgctctgccaaggggaatggctttcttgtcgggccatagtagatagggtccagctcttagggcctggacccttgcacttctctccttcagatttgctagtctgagttttcctctgaaatgagagcagtgacctggagccttctacactgccacccccacgcagcagcctccagtttgccaagttctttgcttgcccttggctacaggtaatgttgatgcataagtttgccaaaccctgggcactgggcaccaatttcaggtagagatttagtgccatttagaacatagtgccctttattattattattattattagagacagagtctctctctgtggcccaggctgaagtgcagtggcgccatctcagctcagtgcaacctgtgcctccctggttcaagcgattctcctgcctcagcctgccgagtagctgggatacaggcacgcgccaccacgcctggctgatttttgtatttttagtagagatggggtttcgccacattggccaggctggtcccatagtgccctttagaattgctgtggaagggcgagattcagagtgacccctgtgaagccaacccaagtggggctttccctgacttctatggttaagcacgccagctacgggctcccctatcagcatgtatttcccctgccacgaccatccctctgttgtaattgtgtgttggtgctgtctgccctgtggactgagggtttcataagggcaggagccatgcacatatggtggagttttggcacagtagcactcaggaatttgtggaaagaataaatgaccactaacatttattgagtatttattttaccccacatgctgttgccttgatattcattaagtgaatgctcacactacttcagtgaggtgagtaaactatgtccactttacacataaggaaacttaaagaatataagctgacttgaatgaagtgacgtacttggtgaaactggaattacccagcgcccaaactcttttagatgcagaggtagcaaatccataaacttggaaatggggccaaaagattaagaaaggggacagttggccgggcacggtggctcacgcctgtaatcccagcactttgggaggctgaggcgggtggatcacgaggtcaggagatcgagaccatcctggctaacatggtgaaaccccatctctactaaaaatacaaaaacaaaattagctgggcatagtggcaggcacctgtagtcccagctactcaagaggctaaggtgggagaaaggcatgaacccaggaggcggagcttgcagtgagcgaagattgtgccactgcactccagcctgggcgacagagcaagactctgtctcaaaaaaaaaaaaaaggttgggggaggggggacagttgtttcctagcctttctagatctagaagtatgaagagacagatttaactgggggtaaaggaccctgtcctcttgggggtactgccctgcaagcgctttaggaagtcatctgattcaatttgaagatttccttctcctcatcccaggattctggatattgcttataaattgtatagtatgtgaccttttgtgcctgacttttttacttagcatgatgttttcgaggtttatccgtggtgaagtgtgtatcagtatttctttttcttcttaatagttgaataattttccactatatagatgtaccacattttctttatccattcatcaggtgatggacgtttgggttgtttccactttttggctattatgtgaataatgctgctaagaacattcatgtacaagtttttatgtagacatatattttcatttctttggggtatatacctaggagtggagttgctggagtaattttttgtttattttatgttaatttaagtttaactttttgagggactgccagattgttttccagggtggctgcaccattttacatttccaccagcaatgtatgaggggctatttctctacatcctcatcaacagttgttattgtctgtctttttgatgaaagccatgctagtgggtgtgaagtggtatcttgttggggatttaaattgcatgtccctaataactaatgacgtttagcatcttgtcatatgtttattggttatttgtatatcttctttggaaaaatgtctattcagatctgtgtgggtcattttcaaacttgtttctaagctgaaaaaatacaaggtatctttgtgttgatttcctttcactccctcttcccctcttcctcgccccttagtcatggagtcattgtaccaggacataacctggaataactgttttgtaataggaaaaagtacccaacatcctacagaaacaaaccccgcatctgggaaggagcctggagaacttcatttgggatgcttcatgagtctggctggaatgttctgtctgaactgggcttaaacaatgtcctggagaagtatttggtgtcctctggttttcacactgaagttatgcatttttgatggaagtttagcactttttttatcaaaagccaaaatataatggatagtatgccaggtgagctttagaaatttcatcaaaataactccaatgagaggtgagctctggcaatttcatcacaatatctgcaaatcacaggcccttgggccaggaaataaccttgaaggaacaccttccatagattgctgccggcatccacaaatgacattttctatgtacgttcaaaattatgtattttggccgggtgcggtggctcgcgcctgtaatcccagcactttgcgaggccgaggcagacctgaagatcacctgaggtcaggagttcgagaccagcctggccaacatgatgaaactctgtctctactaaaaatacaaaaattagctgggcatggtggcgcatgtctgtaatcccagctactcaggaggctgaggcaggagaatcgcttgaacccgggaggcagaggttgcagtgagctgaggtcgtgccactgcactccagcctgggtgacagagtaagactctgtctcaaaaaaaaaaagtatatattttgtatatataaaatgtttatttcctgttcttttaactcctgctgtggagagttaagtcattatgctcttctcttcatggaaccctgtatcagtcattgcagggacctgcttctctttggtttcatgttaaaagtgtcttttttttttttttcagagctcccctcaagaaagattaaattatctttttttcttcttccccctcccatagattccaagtgcaaagtattacatatatgcccttagacatcgccttaaaaaatatgtctaatctataaaaatgctgtgttcttaagatttccagctagttttggcttctgaatgttgcttggtcattcaccatagattacctgttcatccccccgaccacaatggagatccagtccaatgtttaagtgtccttattaccatatcatttctgtctccttccatcttatcttctcactcggagtagaatagttttagttcattttacttttttccatgcttcttttgttttgttttgttttgaggcaagatctcactctgtcacccaggctgtggagtacagtggcctgatcacagctcacagcagcctcaaactccgaggctcaagcaatcctcctgcctcagcctcccaagtagctgagactacaggtgtgcaccaccacacctggctaattattatttttttatgtagagagggagcctcattatgcggccaaggccagtcttgaactcctgggctcagataatcctcccaccttggcctcccaaagtgctgagattacaggcatgagccaccatgcccagccccatgcttcatatttttcaggtataaatcaattttggctgtacgctaaacctcagattttcaaggtatactctgtgtgaatagatacacaaaagagtggacccagcagaaaagccaaaactcatgttgctggcttaaaacaaaccaaaaaacatatatggtgactctaaattataagtgtttaaaattaatttcacttgtacaaaacaactccagcagtaagtcagactttatcaggctttgagatcaaagcccttggaattatctttcatagttcagacatcattgattgaatcttgttttactaaatctttcttgcttctcacatctccatggatttgtatgtgtctgaccacagacatatgtctgtacgtgtctccacccacagagtgtctgagtgtgtgtgaattataaatatacccatctttcaaaatagatctttatctttggtgttaattgtgtctttgcttcttccactttcacagtgagtaagtatagttgggaagtgtacctatatatacagttggccatatactgcctctcactcattaattgtaagctcttctctgtagttagtttcagccaagcttgttggtagctggcatctgattcagtttcaaagcaacctgcctgatggctgctaacatcagagtcaggtgccatgaccttggtgttttacatagttcaagaccaaactgtgaagttcatttttgatgtccaggaggggacttcactttttatatgaaatatttaaaacataaaaaaatgcttatagatgtttatgttaaatatttatacatacaatataaataatacttgggccctttttctctgtcttgtcagtgtatttcactttcttggggactcagggctcttctgtcttactgtggtgttatgatatacactggtttttgtccacgattcctagctcataactgccatatccctagttacagtcttttgttataatgttgggcgtgttaagcctcaggaaagtagaatctctcttctgcctttctttcacctgcctcaaggtaggactctaatcttcccctcctttttgattgtgggtcttttcctaagaccctcccctgagaggggcctgtctcataccctgagagaaggaatgctttcatagaaacccaagaggactgggttcgagaacttccagatggctgaacatgtggaggttcctagagggcagagacccagggagggcatggaagctctgtgccccttctgccgtaccttgccctatgcatcccttcatctgtatcctttccagtatcctttataacaagcttgtccaacccatggcctgcaggctgcatgcagcccaggatggctttgaacacatcccaacacaaatttataaactttcttaaaatattatgagtttttttttttttttttttttttagctcatcagctatcattagtgttagtgtattttatgtgaggccaagacaattcttcttccattgtggcccagggaagccaaaagattgtacacctctgctttataataagccaataaaccttaagtcagtgtttctgtgagttgcttcagcaaattaaccaaacccaaaaaaaggatcatggaaacctcaacttgaagccagttggtcagaagttctggaggctcagacttacgactagtgtctgaaggctggggggtggggagggcagggggattgggggcagtcttggagactgagccccaagtgggtggggtctggtactacctccaggtagatagtatagaaacagaattggaggacacccagctagtgtctgatgcttggtttgtgtggaaaaaacactacacattcagttactgacatggtttagctctgtgtccccacccaaatctcttcttgaactgtaatctccacatgtcaagggagggacctggtgggaggggtttgaatcatagggacggtttcccccatgctgttctcatgatagtgagtgagttctgatgagatctgatggtttaaaagtgtttggctcccagcactttgggaggccaaggggggcggatcacgaggtcaggagattgagaccatcgtggccaacatggtgaaagcccgtttatacttaaaaaaaaaaaaaaaaaaaaaaacttagctgggtgtggtaatgtgcacctataatcccagctactcgggaggctgaggcaggagaatcacttgaacccaggaggtggaggttgcagtgagctgagattgcaccactgtacttcagcctggcgacagagtgagactccgtcttaaaaaaaaaaaaaagtgtttggcagttccccacccccagcttctcttctgctgccatgtaagacctgccttcctccccttccaccatgattgtaagtttcctgaggcctccccagccatgcagaactgtgagtcaattaaacctcttttgtttataaattacccagtctcaggtatatctttatagcagtgtgaaaatcaaccaatacagtcacagaactcttctgtgttgattgttgtggtatgagggtagaggaagaacatggcttgagagagttttttctgtgtgtacccactgtcatccttttagatccctttctgtgcttggaaaatgtccttccttatgacacatggtgggcagcagagtccaccacccagtgggaaaaatacaaatgcagagattcactttccagcatcctttgcagctagggtctgggccctacaggtccgtgtaatcatcctgatctctgatggagagccagtggcaccaaaagctgagggactatgaagagctcagtctggctgtgggaatagtttatacagggctgagtccttgggatggcagagactgtgtggctggtggcagtaagtggtggccagggctggtgctgttggctgcacaggctgtggcactgggggcttgggattgctgcagtcgggtccttacccgaccagttctggggcatgtttgcgtcttgttcccgattacccacgcttacctccttaatatccttttagcaaagtacttctctgcttaaatcaagcattgttgatttctgtttcttgcaattaagaatcttaattgatacaccctgatacacagattctggatcagtggttttaaaattcttttcaggcaaggaagcctttcattaaatgaaatcttatgaggaagcgtaacacatgatgctggtaaaagaggtgctgctctgcattagggccctggagggaatgctagtgcataaagcatagctgtaatccattgccctggacattctgtgatcctggatcaattactgcctccctacccatgttacacaggccctggtctccgccaggcagctgctggatgaggaggggttgatgtttgctgctagttctaaatcagtgtgtatttccagggcccttcatatgctgtttgtctcctccaagacaccggccttctctgccttctgatcgctttcactgggtgaatggtgacataccctcctgtgtgcaggccctgtacaagtgtggatacctggatcaaagagattacatgcctcttagaatcctcttcaaaataccagtccatttctaagattaaaaaacttagcagtcaactaatcagtaagggctgatatttgccctgttaaaagaaagaccttagccaaattaaatttaatagagtttaattgagtgaggaacgatgcccaaattgggcagcctcccaagccagagtaggctcagagagactccagcacagtcatgcagtggaagacgatttatggacagaaggaggaaagtgacgtacagaaaacattagtgaggtacagaaagagctggattggttacaaggtttgccttatttgaccatggtttaaaccgttgatcccctttgactggcaaaaactcagtgattggcacaagactaggttacagtctattgacacctccacataggttatagttcactgtgcacagagaaacctttaggctgaacttaaaatatgtaaggaggcagctttacactaaacttgatttaacagccctcacagataaagtaggatgtgctttgcagcaggtctgccatggcgtgatcatagctcactgcggcctcgaactcctgggcttaagtgatcctcccacctcagcctcccgagcagctgggaccacaggtgcgtgccaccacgcctgactaatttttaaatttttttgtagagatgaggtctcaccatgttgccctggctggtctcaaactcctgggttcaagcgatcctcccaccttggcccccaaaagtgttgggattacaggggtgagccattgtgcctgaccctgacttttttttttttaatttgagattattagagtcacatttagttgacattttgggccagatgactgttgtaggggctggcctgtgttttgtaggacgtttagtgaatctctggttctattccctagatgacatgagaaccccacctcccttcctgggtgtgacagctcagtgtcttcagacactgccagatgaacatgctcttaggagcagaatcattcccagttgagagccgctgctccagagccattttaaaggtacaaggagcggtgccaccactgtggggaccgcagctggacctgacaaattttccttggctatagtagaagcctcagaccctgcagccttggctgaacggggaggaggtgaagccagaggggctgagcaggtcactgccgggtccctgtgaggtgatgactctgtgtggcctctctgggagagctgagaggctgcaggctgtggcgtgggccctttcagccctgagtgagccgtgtgagtagaaggcaggtctgaggaggggaggcccagggaaccctcgccctcccctgcctctcgctgggacttcctgagtaaaggaggaacttgggagccacaagcagatccactgccctggtgatgcagtgggggaaagggtggggcctggcctctcagggcagaacctctgagaaaggcccctgggaaggaagattcctgaagaggataaagccaggcctgctggtggtggctggggcgaggatgctcagtgcgtttggaagacagcaaatcactccaggagtggcctgaagacaaccctctccctcacagtctgccgaagagcagaagtttggaagaaggaaagaagaggcagggtttcctacccctgagcctcattttagggtaggaaaatcaggtctcatgggagcctcgtgaattccgcaagttctcccatgtaacggatgtcggaataaagttatttcggttcagatgctatgtcgtagcgctatgatagctgtgaacatgcaggtaaagtattctcagggttggtgatactcaagcactgctgtttgtacttctgtagaggagtttataattttttcttagtaatgactccataaaacaaaaatgaaagtttcactggaataaagtgttctttttgtgtacagagaaacatctataattaaaaagatagtatattgacttcagatcatgctaacttgatatgcttttgactctattataaatacgatcctagataaaccaccaatgccaaaagcagaataaatcctttacggtgaggaaaaagaagtgggagggaaataacatatggcataaagttatacaaactaaaaataaagctgcctggttctcctcaagtagctcttaggtactttgaatgtcctcagtggaaggaaaaataataaatccaaacatgattaaatgtatgtggacttaaactgttatcacacacatttttagagacagaaagcggatctgtggttggggccggggctgggaatagggattgactgcactctggcacaaggaaaatgttttgggatgattgaaatgttctaaaattggattgtggtgatggttgcataactataactttactaaaaatcattgaattttacacttccagtggataaattctatatgtaaattttatgttgctgaagcaataacagagttattgctgtgtgctttaaatgacatcttatttgaggtttttttttttcatttttaaatgttttgcaatttcaacttttgttttagattcagggggtgcatgtgctggtttgttacatgggtatattgcatgatgctgaggtttggggtatgaatgaccccatcatccaggtagtgagcatagtacccagtagggagttttttcaaccctttccccactccctcccttctagtagtccccagtgtctcttgttctcatctttatgtccatgtgtacctagtgcttagctcccacttataagtgaaaacatggagtatttggtttctgttcctgcgttaattcacttaggataatggcttccagctgcattcatgttgctgcaaaggacatgatttcattttttttatggctgtgtagtattccatggtgtgtaggaaccactttttccaattcgctgttcatgggcatctaggctgattccatggcatcttatttgccttagctgttttgttgtttgtttgtttgttttgaaacagaatctcactctgtcacccaggctggagtgcagtggtatgatctcagctcactgcaacctccacctcccaggttcaagcaattctcctgcctcaacctcccgagtagctaggattacgggtgcgcacctccatgcccggctatgttttgcatttttagtagagacggagtttcaccatgttggtcaggctggtcttgaactcctgacctcaggtgatccacctgcctcagcctcccaaagtgctgggattacaggcatgagccaccgcgcctggcaccttcacagtttttatgtctcagtgtttcattattgcttcaagtgtctgacttaaggtaagtcatttaagccctcagggcctcatcttcttccctggaaaatggaggtgacagtgttcctacctcaggaaactgttgtgtcagttaatagaataaataagtgtaaagcacttgcaccacacctggctcctagtgtcatcaccacaactgccatccccgcggttactgttcactgtcactttcttctccagcctggccaaggccaggtctctagtccaggctcactgcccagcctctcctagccacacgctgcagtaaaggtggaattctgaatgagagctgaatctttctgaaagcattggggctcccctatgctttaggtgagttcagactcctctcggccacgggggccctccccctacacctgggccccttcttggtctcctcatctcatgattcctccagctgtctctaagcccttgattctcctgccatttggaaattcttccagatttcatatgggctttaactgggacagtcttccctctcttctgccaacccttgctcttcctttaggtaccagcatcgtgtggctcttggaaaagccagccaggagtgcatgataggccctgtctactttgtgccccctcaggagccctccagaattgtaattaccatgaacacctgtgcaccatcatgagtcccatgaggcagggtgtgctctcctgccctgcactggtgtggcttccaactgtgcctggcacaaggtcaggagccctcgaaggtaaactgtgtctctaaggtgatgagttgccttcctgtcttaattgctccagggagataacttaatccaaggccatgttcagttaatttagaaaagcctaaagtctagaaccctttctctgagtctctgttcaggagaatgttcctttatgaattctggggatttgatttaaacttgaaaagagattatggccttggcatttggcgggatggtacttttccaaggggaagaaaataataaaagaaattactgtgaaccatgtattaatttgcaaaccaactttttcttacagagttcctctttatttttccaaacatgtatttaaaagatacatttgagtgaagcaatgtcctggctttaatctgcgggatttagtggtttactacccccagtggtaaccagcctttcctttccctgaccactaatgggctggtgggagctggtggttcccacaacttctatttgtgtgtatgttatcccatctttaaagatttctagtttagctgcattttataaggtgtataatattatgtcagtacttctacatgatttatcaataagtaatatatatattggggttacatgctcaaatgctataaagatggttgaagttgtgatgcattattttaaaattaggaatagggctgggcacagtggcacacacctgtaatcccagcactttgggaggcaaggcgggaggattgcttgaagcccaggagttcgagaccagcctggccaagatggcaagaaaggaccacactgtcttaaaaataaaaaaaagaggccgggtgtggtggctcatgcctgtaatcccagcactttaggaggccaaggtgggcagatcatttaggccaggagttcgagaccagcctggccaacatggtaaaaccctgtctctactaaaaaaaaaaaaaaaaaaaaaaagttttctgggcgtggtggcgcatgcctgtgaggataatgattacgtagaactgtatctgtacagtggtttgcagactgtagaaatcagcatgagctctttgggatgaagggttgagcccttcggctcggcctcctcagcagtgttgctggatgctgtttgtgaagcacagttacctgagtcacccgaggagccttaagtgtgtcccccacccctggcttgcactctcaggatgcccttcactgccctgagtggggccggggtgggtgttgagcctcccagctgattccaagcgtggctcctccccagcaaactgagccgtggctcccagacacccacctgagggacttggatacagcatgcaggagctagagagcagtaagaaagactctaagaagactctttccaccaaattaagttcattaataaaggaattaggtaattggcatgggatgtttagaataactagctgataccgggagaaagcgatgcgggggaaaggtaacacctcctgtgcgtgggcatgaaagtcacttatctgatccccatttgtcctcattggtaccagatgtcccatcccattgtatcatttctgtgtggcttactggggaggcagaggggatgaggcaacagctgttttcttcctgtctccttcatgccctgcccacactttcattctccattctgggggtagtggaaggaaaggctgctgctcccttcccagaaaccagggccatcgtgcccctccttggccttactgttggaatactgggaatcctgtgactgtacccacagctgcagtcctaaagcagggaggtaggcaggagaaattttattaaacatgcttggaacacattcgtgattgggggtggggattgtggctcttagggcagccctgggaagtttaggtgactgagtattttaggagtctgcacatgtctgcctggatacctcatgaatgccagctcatcctcagatcccaacttaaaatcccttcctctgggaagctggttccaattctggactggtcgggctccttccctgctctgtgcccgctgggacagtagtcttcagtcatacatccactcagctccaccccaaatctgtcccttgctctgcaggctcaggccccccaccccctcatcatgcacctggacttctgcatcagggtccccctcagtcggctcctggcctctcacctcttccctgctgccggctccagggtgacctggaccaccaccccacactttcactgcccccagcagcgtttcttaaagctgggttggatctgtagaaggattccccagggtgcttttttgagcttccccaagacctgctagggctgaccattgtaggtagcctggagaatgtgcatttgacaagctccctggtaatgctggcaaaggcagaagtttagggaccactgagcagggtccaccaggcggttcacagtctcctatccacgcgctgtctacatctcatgactctgtcccatgccctgcacaccccacccgccacaccccactgccttgatttcccctcacgtgcctctgttccctttcacactcggagggctgtggctgtgctgtcagtgtgcacagatgctgttgggtagccctcctggctgtgactcccttctggtgtcctgtgctcacctctgtgtttggtagctgtggaactcaatgcccatcccagagtcaatcattttgacttaagacaagcgattatatctttgcactcctaacatctgtctagcacagcctgacacctaggaggcagaaaaaacagttttgaatgtgcgagttgagtgtggccaaagtgagaagcacctggagttggcctgtattctgtggctccctcatgtgcctagcccccaaacactgccctcatgttacagggaaatgtggcaagtgaggatataaaggtgtaggagataaagaaatatggcaacattattgaagttaggaaccgtctggattttgtcttggtgcttccaagacctcagcatcacggagcagtgggttgtatgaagttcaaggctccctttttcatggaaaattacaagcacatttatttttaggtcccatgtccctatttgttctttcttcaactctttgtgtggcaatgttaacaaagaggaggaggagagagggcaggatgacaggacagacttgccccatctgttactccttctccaatatcaccagtgaaaaccaggattccccagacttttgccatcccggttcccatctgttgcgtttcttaccattgatgaaagccattgacaagaataaaagtgactgataaaataatagcatgggggaaagtaaaatctacaatatgcttctgggaatttgtcttaccagcgtggataaggttgtgcatcgcagcgttggttgtggaaacagtctgtgtgtccacttagactgtagtccagccacaaagggggacattctgcagctggaacagaaggaagagaaggcccacatggaaaaatttctgttctatagtgttcagagcaaaaagtaaggtacagaacaatatatatcttctttgcatttttgtgtaagagaaaggtaagaatatatatttgtgtttatttgtaaataattgagagatcctgcgtagacaccaaagagccaacacaatggcagtccatggtgggggcacggggagggctgggacagtgtgggaaccggatttctcagagtgcctctctttatagtatcttgatttttttgaaccatgtgaatatcttacctttcaaaaacttatacagaggttaaaaacaatatataaaatatgatttttaagtttaaagttacataaatagcctgatcattcttttgtcattaacaccaaaccactcgccagcgtttgccccgcctggggccccgcatggctttcatcacaagcttctcatttcacctctacaaggagggtgtggacttgcccagtaatgcacagctggaaagcaggcaagtcaggattggaactcctgatctccatcttggggattataaaacggaagcagagcagagggtacttcctttcagtgatggacacgggaccaattcacagatgcaggcactaaaaactgcacctgtgaagttaaatccagtatcttgggtcttttcatgctttgtaaagttgtgcttcatgtcttcaggctctttagggtatctgcatccagttaggacccagtggtcatctcatgtgacctttgaccccttccctttgtggaaagcagtagccatgcacaccctgtagctctggggtcaggtgagcagggccagcctgggtgtcagggcagctcaggcggacagggctcaggcaggcttcagagtggagagccaggagggcggcctcatccctaagcccggctcctgaggcagctcaaagaccaactgttctaactgttcacccaccaactttgagcagctgactgtgtagtgttcctgagtgtctttgctgtgtagacggcacgcatgtatcatcatgttctccacgagaaccaaaacccagctctcttggcacaggttgtgtacttggctaatacaatttagttgtgctcctagtagaacataataaggacccggtcagtctgagcatgatctctttctgctgaaacgtggtcacgtctccctgtgagatcagcctgacgagagggctccctgagctgccttttcccagcatattggagagctgcacgcccggcttctgtcacaggaaaccccaaagctgctgctacttgtgctgtaggaatgttgtcaaaactgccaatctgtttgtgagcttcacacctgatgggagaactgctttgttctgaataactattatgtttttgtttgttttcctcagactcaaaagttttccacaattgtgtacctttctgctttggctgtcttaaaacacagatttgtattccagtgttgatacttgtagaggctttgtattcttttttatttttatttttggagatggggtcttactttgttgtccaggctggtctcaaacaatcttcccacctcagcctcccaaagtgctgggattacaggcatgagccactgtgtcccgccagactctgtattcttgacagtgtttctccctgggcccacagcctttctgttttatccggattattcctagccctcgtttttttttttttgatttttaaaaaaatgtgtgttgttgtttattatgttttctcacaaacagccacaaattctttgtggaatgaatctcaatataagcaaaggagcaaactttgtatcttaggttcttctggacttgatttttttagcttttctcttgtgcagggatcagcaaacattttctgcaaaggctcagatagtaaatatttcaggtttttccacctaatatcttacagttactcaatttgctattgtcaagtgaaagtagctacagctgataaatagatgaaggtgattgtgttctaacaaaattgtatggccactaacatttgaatgtcataattataattttctcatgttatgaagtattattcttttttgtatttttctaccactaaaaaaaatgccaaagccattcttactttccaggctatagaaaatcaggtggccagctggctgtgtcctgtgggctgcagtttgctgatgcctgctccagagtactgttgtgttttgaccacttccaagaaagaggaggcattccaattagcagccacagccagtgctcaacccagcattggtcttatttgagtgacagtcagagtcaagattcacatgcacctgggaataccagccctgggactgtgtgagggcaggagtaaggtctggagcaaccaatctccatttcttgcctctcctgaagagtggcagtcccttcagtttgaggcatgaatgtctccttacagttctttcgtaactaggcagtagactgttgatccccttttaagaaagcatctttattaaatcagttaatctaacactgtcataaaatatgtgtaaaatataaggaattttttttaattaaaaaaaatttttttgagacagggtctcgctctgtcacccaggctggagtgcagtggtgcgatctcagctcactgcaacctctgcctcctgggttcaagcaattctcctgcctcagcctctcgagtagctgggactacaggcacgtgccaccatacctggctaatttttggatttttagtagagataaggtttcactgtgttggccagggtggtcttgaactcctgacctcaagcgatctgcctgcctgggccttccaaagtgctgggattccaggcgtgagacactgctcctaggctaaaatataaagaattaatgatccaatgaacaacccatatgcctgcctcccaacaccattactttgaagctccctttgtgctctccccacacagggatagctacttgctggaaatttgtgttccccattccattgcttttctggaaagtttcaccacaggtgtctgtatccttgaacagaggcatcgttgcacttctcataaatggaatagcatgccatgtgttcatctgcagcttgctttctgtttcattcaacctctggttcctgaggcccctgcctgctgttgcatgtaactgtaatttactcagtttcaccatggtactctattccattgtgtgggtatcccacagtttacttattcattctgtggtggagggacgcttagattttgtccagttttttgttattacaagcagtgctgcttttaacattcttgtatctgtctgttggtgtatgggggcaaaaatttctcttgggaatatattagaaatagagtggccagcttctgaatttttactttattgatcacactggtatgaggcatccatgtggcagacgtgatttaccagtgattgctgagcatgtggattccaggtcctggccctaatgcccatcatgttgctactctaggaagatgctgccctttccaaatcatgcatcctaagttagagatgcctcctataaggtgaggaaaatcatgcctctacatcttctcatgcttcctaagcaggcttaaggtttcgttttgtgccctttgtgttggtgacagtgtgttcatttggcgtgtcggtaagctttgcagacattgtgtgttctatataaagtttcttttatgctcaatagaaggcccttaccttgtcataaaagtgtacagcataaatcagaatatctctttgccaactgttgaaagggcccatttaacactggaacaagtataactggctgtgattcatctactatgtcgacatatttgaagtgcatttaccctcactttttcctttctggaacttatatttctttcacgtggtatatttcttttgcaggtttggcttcttcgtggcatttgtagaaaactagcaaaatatgagctttgcattcccccggatccagaagccaaatgggcagactagactttgttggcactctggccctcccagcacacctctctgggcccactctccgctgggtagtggcacaatgctttctcctgcctctcccttccttctgcctttctcggttctcttcctcaaaatctacctctgcagtcacttccccagggtttacaataaacgatgggaatggccagtggggaaagggctttgagtcagggccgctcttctgacccctggaagtctttcataagtggggtcaacctgaagttctaagtgtgattcccagagggaaaagcagggttcatttctctggccccaacttcacaccttccatggaagtcttagaggattctgtcaggctcattcaaggacagcaaaaatgcatcgccacattctcctatatagtcatcttgtgaaaatacagcagcagcccactggaaggacccaatagttgtttattttttccttcatgactaaatcaaaagtttctacactgatctaagtagaaatagaataattcaagggaagcaatgaaaagtaattcaaaataaatatgtagctaaggctgcatgaatgtgtactcacgtgggtggaggagtacacagggtcgttgctgccactagggtatatgcaaaattgggactgattaaaatttagtaagctaagcattctttcagcagtcttacaaactattattggaaatgttaaataacaaaccatttttgccacaacatgtgtttctgtaacacaggttagctcatctactgttacgattgtaaatatgggaattatgtcagaataatgtggaaaccagtgtttccccagcatgtttatattttgcagtggtgcacaaagccagcagaattctgtaagctgtggaggaacacaggacccattcaccttgtccttcttggtttgcattggccgtggctctgttccagaagtgattttgcctggctgtctctgagctctgtgcattttgcccttgttacaactcagctgcctcaactcctctttacctccttttcaattaagcttgtattaccttttaaaaatattaagcgacatcactttcctttttttatttaaaatatttttaaatggtggtaaaatatacctcacataaaattttccattttaatcatttttcagtatacagtggcataaagtacattcacattgttctcatcaccaccatccgtctccagaactcttttcatcttttcaaactgaaactgtgcccccattaaacactaacttcccattccccatcttccagcccctggcaaccaccatcctactttctgtctctatgaatttgaccactctacatgtctcctgccaccgggtttttatggtatttgtctttttgagtgtggcttatttcacttcgcataatgttgtctgagtttacccatgttgtagcatgtgtcaggatttccttcctttttaaggcctgataatatttcattgtatgtataccccattttctttattgattaagtgctgttggatacttaagttgcttccactttttggttattgtgaataatgctgctgtgaacatgggtgtgcagacaatctgtctgagtcccctgcaagtcccgtttctttacttattagtaatttaaccagtttttaattgtgctggtatttttttattatttatttttttgagacagattctcgctctgtcacccaggctggagtgcagtggcatgatctcagctcactgcaacctctgcctcctgagttcaagcgattctcctgcctcagcctcctgagtagctgaggattacaggcacgtgccaccacgcccggctaatttttctatttttagtagagacagggtttcaccatgttggtcaggctggtcttgaacacttgtcctcgtgatccgcctgcctcggcctcccaaagtgctgggattacaggtgtgagccactgtgcctggcctgtgctggtattttttaaaaattgtagttgttactctcttattaattctctgggtacaaatttacaccaatattcaatggttggtctatgagtctctttctctatcttactctctctttctctctctctctttccataagccttattagttgtactacagcatttttgaagatgtatcctttttagtaatcagtatagcaataatgattgtatttgatgatgaagccagaaatgggtagaaagaggcacctcctcttctcactgacatcagtaagatataatgatgtattgtcatgggtcattgtgtgtgtctggcaccttctggctctgtgctggggtcagtctgggtgctgtggtcatgacctttgatgcatgtgtgaaacattctgtcaggaggcagctggctggagccagcggcgctgtgaccaacggagatacacaggctgggtgggtcctgcagggattactgtgtgttggaagcgggcgcggggtgggggtgtcctgtgatcccaaaggttatgaatcaacaatcaaattccataacaataaaatttaatcagggcctttgcttcatcaagtaaatagatggtgaaaattaattcttcatcctttttctcttgttctgattcctagtcatctgctgaaatgggtggtttgcattaaaaaaaaattgagctctgaactatgtgaatggctaattacagatatttatttttaaatatgctcagaaaatgagtaaatgaatgcttatgaggcccatgggttacttctggtgtttcattatggaagtgtttaagtattgctgtgggttgatataatttcatatttgggaatgctttattataagttattagtgaatattgatttctacatttaaaaaatacctgtttactggataaccagttgagtcattcgtgggttcaatttgacagacacagtggaaattttgaatagtctgatgctgtaaccagcaccattgagacattcctgccctttgtcagggctccctcagttggtgtctgtaggtgtcagaccctgctcattgtactggcccccacgggacacaaaacacaagcagagcccacacaagggctgggagggtactccagcgcctgacacagggtggtccccaaaaactatttgctgactggttaatccaatttgcagaagtttcgagaggagtgttgatctgaattctgaaggacagaacatttgtctggttgaaaaatggggattttaaaaatattccaaatgctaagaaaaacaaatcagtgaataattttacttggtcttgaaatgttaaaactaacattattattaaatgagcaaaaattgtggtataacatgttaagcttctttatgttatccatagatactagttttcctaaatcttttgtgaagttctttgaccatattatcttttctaggtagaattttgttgaatgccagaatcttgaaatctgatcagtaaggggtttttgttgggcacctgccttgggtacagagctccacttggtgtaggtgctatggggatagaagaaagtacatggccctgtccctgcccagagatgcctgagaaggaaagcttccaataaatgagctacccccattttcttgctgagggtatttaacaccgtggtaaagaggagaggcctgcaaatggatttggttcagttcctttgtctgacactggatctgacgttttaagcaaattattttgccttgcattgccttgcctcagtttcctcatctataaaataaaaatacataacatgaccaggcagagtggcatgtgcctatagtctcagctacttaggaggctgaggcaggaggatcgcttgagcccaggagtttgaggacagcctgggcaatgtagtgagagcctgtatcttaaaataataataacaacaattacatgattttgatggcatgtggaaaagcgtggaagtttccttttgcatggtgcttggcatgtacaaaacacatagtgaaggctgggtgtggtggctcacacgtataatcccaacactttgggaagccaagatgagaggatcacttgagcccaggaatttgagacctgcctgagcaacatagtaagatcctgtctcaacaacaaattttaaagttagctgggcatggtggttcatgcctgtattcccagctacttgggaggctgagacaggagaatcacttgaatgcaggagtcagaggctacagtgagctatgattgctctgcactccagcctgggcaacagagcgagaccctgtctcaaacaaacaaatataacacatggtgagatactaactatggattccagtttgggctgactcttgatttgactcctgcgtcttatcccccactctcattcctgtgacataatcagacaaaaatcaacataatcctgaccaagaaacagtccttgcctgacttttcaaagctgcaagtccatttttagacatgggccaccatgcaggtgaatctgtgggagtgataaccagcacttggggccaccttggcagacttgcagagggggaaacatctggcagcttcctttgttccaatgggtttattttaggcctctgagtctctgatacctagtggaagcctggcacacaaaaataatactaatccaggtacagctataaaacaaatgactctttcaaagtgggggaggttggggataaagcatgtagcttggttatcccaggttactgttagaaaggagaagcccaccctggggtaagggtcgttatccttcctgggatgtgtctcaggacaggctcaggcatgacttgcagccagcacccccggaatgcccggccttcctcattttggtctcttgcaggccaccttcccttaagtcactatcggtcactgacctcttccccagaaaaggcttaagaggtctctagacttacaatgatttctatgtccactcttaggaacttttatttgctcatttgggccaggtggcataaaatcaaatggtgcttagaagtgaccacactggtatcaggtcatgaagtgtgccccatttctgtcagggaagcattctcctgagaagtcctggtttgtgccaagcattgttatcttggatgacttgggtcctggtcctgaaattgagcatgtgcttaaaatgacaagagggagtaaataggacaagtagataggttagcctggtcattcctaggtcagagtggcttctgttgagaactgaaaattaggctgaagcctttgcagagcagctggacagataagcatggaggagagtgtatgcacactggagaggtgggaagagggaggggagaggacgaggctcagatagaacaagagagtgcaggagaggggcagagatgctgtggtagactctggaaccaccagtgatgctgctgtcatcctggcagcttggaagcagctatcatcctggctgccgcatctggcccctgtgacagctgaaaccaaaggtgggactggctggagctaactagaactggttttccgcagtgagatttcaccccacacagaagaagagagaagaaggctcagactgggaatgattcagtgacgtgttcagctgcctggtgtgttatagtttgagccatcccaggaggtgcaaatcttcagcactttggactaaaaacaaacgcagacttatgccctgaccattccagcgggcagcacttgctgtctgatcggacatgtttcattttaggaaattgctcatttctgttagtctcagggagctatcatggaccaggaactgcagtcttttctggtgtgggagtctgggatcctaaactgttgtgagacccctgctacatgcccttaagtttgaaggggcagtttcaggaggtaaagattaggggctcttctttagaagagtctaagcctttacaagagtctttacgagactctttccgcgttgtcgaaaccccataggttaaaatgtctcatctgtgtgctctgcacaggcacacagaggcctgagtcgaatttaaaagaaggcactgggcacccaagcccttcacccttttctaaaagaggagcacatgagctttgcattgcagatgcaatttttatttttaaacaccgtaagtgatggcgtgtgagcagtgacgcatccacagccagctaatctgtattgtgtaaaaacacacaaaccacaaattatttttaaaagggaagaaagcagaagaacagatgcagcaaactccttgtatcacgtgaattgaggagaaaaactccaccagatgcgtttctgagcaacagcagagggaacactagcatgcccagatggggcagggagttctgtctgcctgcttctctggggaagacacctttctttgtgtccaatttccaggacagtgacactgtctatttttgtgtgcatgtatttcttctttctctttctttaaaaaaaaaaaaattaacaattacatacatattgaaaagtacagcagtcagagaagtgtgcagtattgttacaaagtgagccaacctgtaactcaagtcgcagaaatttacccggcgaaggcctgtgtcttactcaacacacctgggttatgaaatagcctattatataacccagctccccttacattttttttaaaaatgagattaacatctaagaagtaacaaaaatggtactccttggaccatgactagaactaaatgttgttttcgtgaatgcggttagagaccttctggatcaagaaacacagagcatccgagtgggaagcattctgtcttctgtccttggctccagtagcctggttgggctgcatgttctccatgaggatgagtggtggccagatctccggaccaggtggaaggctgtgcagggcatcccttctctgtcggtttcctgggtggggcttggtcactggagtggggatgcgcagcgaggggcagctcagggctggactcttcactgctgtcttctgatggtctcagctggaagctgctgggtgctagtctgcactgaagaacccccagcccagtgggggaggcaagccgggcacagagcagtgcgtcatgatgggggcacaggattccgtggacattggcagcaggcatgctcaccacatcttggggtgagtgggatggcagggaagggtcccagaagaactgatgaggaatgccaaggtggaagtgccaaccagcagaagttagatggagaagaggcccagagagcagagttcccgagagggagagtgtgcagaagcctggagcctggagaggggaggaatgaaggcgggatgaggtatggccagagagcagagggaatgccacacaggaggacaaaggagagatgcagctagatgaggagagaacagccacttcatgccagccttgggaggtcccccggggagtgcggtcccctgaaggcagaggcagagggaggccatgggaagcacccagggctgggctctgggtgtatcttctgtgttttgatggagtgctgcccagaggtgctgggtcccctgtcctaggagagtcctgtgtctagaaaagctccagggaccacggccttcagatggccctgcctgtggacactgcgagtattgtttggccttcagtgaggggcagtcttgatcaagaaaatgttcctagggctatgtttccaagaggaattcagaaacccaggccgtcaggtcccgtggtcagcaggtggccagcggcagagcggccacacccatcctggtgccctctctttatggctgccacctccctctgggagggcctgggggaccctgacaccattctgtgggagagatgacagtaaaattaggctgtggacataatgtgagcatcttgagagttcaggagcctcttatccccatttgcatcctcagagccctgcaggtccccaccagtcccaggacttgccggttctgggtttattttgtgtggtctttgaactccatattttgcgttcttttcatcacagaagaactatggctacttctattgtgaggccaaaagaagacctagtccatctgagagggacctgcagaattccagttccatgtggtgaagaggatgtgggtgtctgcagtactgaatttggtagtatgctgcttgcagtgaatgtcctctcatttggcacatcccccaggccctgagggcttccgtgggaacagctttagcttcagatccaggtccaggcaccataagtacatgttggaggaagaaatccttgaatgaatggatgaatgagtgaatgattgaattccagtttcaacctgaggcaggatatttgagttagtgatttttaccccaaagtaattctggcatcctactccatctcttccttgtgaccctctccaagatgagtgtgtttccttttaaggtgggggcagcacagaagacttccccatcctggttcctcctcctgcccccttccttcccaggcttgttacctctgcatttcccttgtatcagaacctaagtcttctgaatcaaatccccctagaacttgtgaacattcatctcagatcttacactcatgggaaaaagccccccatatggctttccatggatgtgactctacaacctaggaggagtcccaggccaggcctgggctggacccggaagagcgaaggaattgatcatggagctctgccatgggaggtggttggagaggcagcaggtggttcttcattgggcctccacatcttcatttgcctaacctttagtttggagggatcagtttctttatcagaaatccatatgtccctgagtgtgccaggaataattagttgattccaatggtgattgaatgtgtcctcacctaatctaccaactactagacacaaatactcacaaacctggaagctaccaaaatctttctctttgcaactgcgaaatccttcctaatgccccagacagagctccaatttccagcccatccctcttggatccacatcctcttttgttcattcatgtattctggtagtgatcaggtgtcatgggtgctcactctgcagggacctggtaaggtcccagacaacaggagaggcagggcgcccttctgagttccccagcagttaactcttagtaacgtgggaggggaacaggcttcttggagggatgctcattgagaccagacacatgctgagacctgaagtggggaagggggagcatgcgggatttactcatgggagacatgaggcgactcctgcctccctgacccagtgtgctgggggcagagcagcccagtggatggatggctggctccctgatggaatgatgtggtggcaatgcctcactgcctgcctctctccatggtatagaggtgggttcctctataaaagtttcccttcataaaagaagtagagaaagccatcagagaaggcccgacacctttataaactgagtttctagcaactttgcaattttatttaagaactgatctcgcttatatgtggaatctaaaaaaattaaacttatagaagcagagagtagaatggtggttaaaagagttggggtgggggctagggtggagtggattggggagatgtcagtcaaaggatacaaaatttcagttagataggagggataagttcaggagatctcttgtacttcatggtggctgtagagaataacaatgtattctataattgaaaattactgagagtagattataagtgttcttatcacaaaaaaaatggtaaggatgtgagatgtgcatattaattcatttgatttcaccataacacaatgtatagatatttcaaaacattatgttgtataccataaatatatgtagtcatgccttaacaactgggatacgtcctgaaaaatgtgtccttaggcgatttcttcattgtgcaaacatcctagagtgtatttacacaaacccagattgtagagtccactacacacctagactatatacggtatggcctattgctcctaagctgcaaacctgcacagcatgttactgtactgaatattataactgtaacactatggtaaggatttacctatctagctaaacatagaaaaggtacagtaaaaatattgtataaaagataaaaatggtacacctatatatagcaccatgaatggagcttgcaggattggagttgctctgggtgagtcagtgagtgagtggcgagtgaatgtgaaggcctagagcattactgtacactcctgtagattttataaacactgtgcacataggctacactaaatttttttttttaaagtaactgctgtgatgttaggatgacgacaacatcactaggcaatagaaatctttcagctcgtctcccgtctccctctcccatctccctctccctctccctctcccatctccctctccctctcctttccatggtctccctctcatgccgggccaaagctggactgtactgctgccatcttggctcgctgcagcctccctgcctgattctcctgcgtcagcctgcccagtgcctgcgattgcaggcgcgcgccgccacgcctgactggttttcctgtttctttggtggggacggggtttcactgtgttggccggactggtctccagctcctagccgcgagtgatctgccagcctcggcctcccgaagtgccgggattgcagacagagtctcgttaactcagtgctcaatggtgcccaggctggagtgcagtggcgtgatctcggctcgctacggcctccacctcccagccgcctgccttggccccccaaagtgcgaagattgcagcctctgcccggccgccaccccgtctgggaagtgaggagcgtctctgcctggccgcccatcgtctgggatgtgaggagcccctctgcctggctgcccagtctggaaagtgaggagcgcctcttcccggccgccatcccatctaggaagtgaggagcgtctctgcccggccccccatcgtctgagatgtggggagcgcctctgccccgccgccccgtctgggatgtgaggagcgcctcggcccggccgcgaccccgtctgggaggtgaggagcgtctctgcccggccgccccgtctgagaagtgaggagaccctccgcctggcaaccgccccgtctgagaagtgaggagcccctccgcccggctgccaccccgtctgggaagtgaggagcgtctccgcccggcagccaccccgtccgggagggaggtgggggggtcaggcccccgcccgggcagccgccccgtccgggagggaggtgggggggtcagccccccgcccggccagccgcccagtccaggaggtgaggggcgcctctgcccggccgcccctactgggaagtgaggagcccctctgcccggccaccaccccgtctgggaggtgtacccaacagctcattgagaacgggccatgatgacgatagcagttttgtggaatagaaaagggggcaaggtggggaaaagattgagaaatcggatggttgccgtgtctgtgtagaaagaggtagacatgggagacttttcattttgttctgtactaagaaaaattcttctgccttgggatcctattgatctatgactttacccccaaccctgtgctctctgaaacatgtgctgtgtccactcagggttaaatggattaagggcggtgcaagatgtgctttgttaaacagatgcttgaaggcagcatgctcgttaagagtcatcaccactccctaatctcaagtacccagggacacaaacactctgcctaggaaaaccagagacctttgttcacttgtttgtctgctgaccttccctccactattgtcttatgaccctgccaaatccccctctgcgagaaacacccaagaatgatcaataaaaaaaaaaataaaaaaataaaaaaaaatatggaaaattcaacaatactagaatagcattcttccatggagctgagtagttgctacacactttgaacaggacaggtagtcaccagtttgttccaatactacctttttccatttgtccttgatactataggtcaagtgaaaatgcagaaattatttttcttgcattatatctttcagatgtaagagtaaagtgaaagagaaaagtgaaaaattgatcagatttatgtcttcataaacatctgataatgagaattttgaagaaaagtttgtgtgttttgagaaaaatgggcaacagtgtgggagattgaaatagttaaaaatctaggacttgacaaagccaggacgttttactaagttatgtgatcagcctattgtatttcctgtaggcccaacctggtcttaagaaaaaaaaaaaagaaaagaaaaaaaaaaaaaaaagaaagatattttcctgaaaaactaaatcaaaactggttaataaaactttaataaaccaaaaaaaaaaaaaaaaaagaaatcttttagctccattataatctcataggaccaccattgtatatatggcccattattgacagagatgtcattatgtggtacgtgactgtagaatttttatttgtcaattaataaataaataagctcacaagatgtgttaggtgagcagggcgctctttggggcatcacgcatgactcaaagcacttcagtgctggaatgtcaagtccttcttccctgaaaatcgaaagttttaaatgattagacattctatattccttggtatgtagggatgaaatgaaccccatctgtcaatacacaatttctgattgatcactgctttggccttgtctccttcccaggaggcctcagcaagagccatctctgtgggtgtgccagccacggtcactctggtgaagcccgccttctcctgctaccacctgtcttggggggcccgattgactgctgtgctgtggcctgagcagtgcagctggtgggaggaggtgctcttctagatatgcagacagccctctacagggaggggtggaccaccgaggagaaccagaaagagcctcttcttctccttctctaaggcagagcaccctaaacattgcccacaggccctcaatttcacacttacccagccagtccaagcaggaggcacacattttgcatgcacacattcttccactggaatctgggagctcttttgctttccgggaaatccaaaggaagttctcagaaattgtggtgtcttgccaccgcagaatacccagcacagagtgactcagacccatctatttatcaaggtggccctcacaagcagtttctcctttgggtatcaggaaactgagttgacacagttttccagggtagggactgtcttggtgataagaattttctgggaagagagattttaaattttcattatggaaagctcattacctgccccccctttagaattttaacttgcctgattattggcatggcctgagaagtggggaggatgaggacttgctgagagagggcaggtgtgggtggcaggagcatggcattttttgggaatgaggcctcatgtcctgggttagcagtcatgacatctgaaactcccaggacttttttcttgggctccctgggcagcctgggccagctctgcagagccttgaggtcaacagtgggtggggagcacagactgcctgacttcaggaacccttttccctcttctgactgagtgacagcatcctctctgagtctcagctgcttcgaccctaaaatgggggtaagacctcttgctttaccccttgctgagacactgggcagactaccttcaaaagctatggtggttcccaacagtgagggaggtggggagtgcttccctgggggtcgtgcaccgtgagtaccagaacagaaggcctgtgggtgcaggttgggaaaagcacctatggactgtcgtgagctccccctccaacctgttgaatgggattgtcctgaagaccaaccctaatgcacgctccgtgggacacctggccctatgtaggcatttataaagaatagctatttttttaacttttattttaggttcaggggtacatgtgcaggtttgttatataggtaaactcatgtcatgggggtttgttgtacagattatttcgtcacccaggtactaagcctggtagtacccaatagttttttttttctgatcttctccctcctcccactctccatcctcaagtaaacccctagtgtgtgttgttcccctctttgtgtctgtgttctcatcatttatcttccacttataagtgagaacatgtggtatttggttttctgttcctgtgttagtttactaaggatgatggccgccagttccgtctgtgtttctgccaaggacatgatcttattttcttatggctgcatagtattccgtggtgtatatgtaccacatttttctttattcaatctgccattgatggacatttaagttgattacatgactttaaggatagctgttatttattaccctataaatcttaaattcttcctgttcttttctaagatttatgggtattttctcctgcatcacattgctttaagcatgcataattttgcttaagctaagaggccaattctaaaaagaagaacttactttcagggaatcattagcctcacattccagttttctctcaaggacattgtgggatgttagatttgtccttcagaacattccttttgggaggttaacatggagggtttgtttggtttctgcttttttattctggtcatcactgagattacatttctcagactggattcttgctagaggttgtggttgccggctccacgttaaaaaacccgtcaccaagtatctcatctcctgtccctgctcattgctccacgagcccagcagtagctctcaaacatgagcatgcaccagaaccacttgcttggataatctcaaagtttctttctgcaagatgcttattcatcacaaaggggcaaacagcaactttccattggagatatctaatagataccacctaaaccagatgacctgagttaacatcacctgtaatgggacatacctgtcatcctgtatctcttgataggatgcccaagaagagtaaaatcttatgtctgtggtatttttgccaaaaatgcataatcagaatttaatcacaaagaaacaaccaacacgccaaatctgagaggcagtctacaaataactgaccagtactcttaaaatattctgaagttatggaagacagactgagaaacagccccagattggaggagacaaggagagatggcaactaaatacgctgttgggaccctggacccaaaaaagaacatttgtggacaaatggcaaaatgtgaatataagttatagagtagttcatagtattgcatcaccattaggttcctgattttgataatgtactatgttttgtaggaggttaactttgggagaagctgggtgaagattcccagcaacttctctgcaccagggcatggagaaaagcactcaggtgtgggagcaggaaaggtctggactaggttcgaaacttgtttctgatgactatcagctgagtgactcggggcaggtcccattacctggctgagcttctgtttcctgatctgcaaccggggatgaactgcccgcctcctggtgttactgcaaggataaatgaggtgctgtgtttggttcacagtaggtgatactcccttcctactgccttgcctccccagctgtaaaccatcaactcctcttctttccttctttccagcctttcccctgacctgtcccttatctctgccaaccctcaccatgcaccctcttggatggtgttttcaaacaaagcctgcaggtgcatttactcccaaggtctagaaatctgagatgagaaactttctctgtttcttgctggatggagcctgaggtaaaattgagccctgcatcctgcctcagctgtctttttgtgagttctggcttcccatagaattatcattcaaagggttctacctgacctgcctgcagttcgcagtgtggtccctggaccagcagcatcagcatcatctgagagcttgttggaaatgcagaatctcgggccccacccacagactcaagactgcacgtgtgcaagattcctgggtggttcatgattcaagcttgagactttctccactcgaggacttgtcatagaggttgattcccaggtgaaagaacagcttgccttctcatcgtgtgcctccacagtggaggctgaataggagtcagtgtgagaactgagaaatgtgaagatgggttagaaaaatctgcaggacatgcatcattccctgtcaggcccttgtgtggagttctctccccagacatttcaggggcctgagatcctgctgacagcctagaatttcagccaggacctctgtatggggtttcctggccaggatcttgcctgggggtgctgcttattttctgcagggacttgggtttctcatcctgttcgctagcctgggtgaagcatgcctggggcctccacacggtaaacttttgctgccagagcaactcacaaccaggactgtagcctggttctgagggtgttggagctggcatccaggctctgcgagggtgtccacaggaaatgaactgtacagattgcttttaaatgataagaggcttgtggcaagactgaataattctcagcttgattcaggtactgaataggctgtattttaatctaagctaacgtttcttgaatgactcggtgtccgtgagaaccaagccatgtgctttatgtttctcgttgtttaatcttcaccatgaccctgcaaggtgaaaccgccactagccccattttatggccctgaacactggaccttacaaaggctaatgtggcccaaggtcatgtagcttatacgtggagctgggatttgaacccagaattctcttgagtttggagcccagcttttgaaccgtgtgctgtactgatcccagctcctgcctggcatctgaagcaggacagtcaaaccaacggcttcttacaggcagggcggaggtcatggccctgcaggctccttccagcatctgtgtccttgccctggattaatcaggtgaggcgggatgtgctggtggccactcttgacatgtcagggataagtgttgggttctgggtttgggtctctggctcccaaagagggaagaattttgtgcctggagatgcagggtcagaatgccccctttttgcatggtaagtggtgctcatgacagtgctgctcctcgtggcagggccatgccagtgtgcaggaggcacacagtaactttgaagtgtgggatttcgcctgggttcagggcattctgggagtgggctgcacacagaagggaagtagctcagaaaggcaccgcaggtcacacccacaccatgcagtcgccattcctgttttgtgttcattttctttcctttccccctccctttctaacagataagcaagggaaagcggaaaaccaccagaaactctaaattaacacctgcccggtttagtttatcctttcttcctcaggattccagtgcaggagaggctggtgtttttaaaacccagttctctcttagactcagctgaaaggctcaaaggtaattagctgttatggaaagactgcattgtcatttttaaaggctgccttgtgggagtgatcattatctgcagcaggataggaacacggcaataaaaatagaccccagacccttgtctgcaggagctaaaagaaaccaaccaattggtataatgaaaattaggcagtgggccaaaagttgccattctctcactttttagttagaaaaagtgtcataaagagaatacagtttatttactgttaaaatttagtggattcagaaaagcaaaaataatgacaaagaatcacccataaatactaccactcagaatagctgctgttagtgcctcagcaaatgtacttccagtctctagctccggtgctcatgaataaatgtttatttgtacagaatggagatcacgctgatgtataattttataaaccacttttttttttttttacccaataacatttcagtcttttcctatgtcaaatgccctttctttctttcttttttctttttctttttttttttttagacacagagccttactctgtggcccaggctagagtgcagtgacgcgatcacagttcactgcagccttgaccccctggactcaagttatcctcccatctcagccctctgagtaactgggactacaggcatgcaccaccacacccagccaattaaaaaaaaaatttgtggagagagggtctcactatgttgcccaggctggtctcaaactcctggcctcaagcgatcctcccacctcagcgtcccaaagcactgggattatagttgggagccactgtgcccagccataaatgcccttttaagtagcatttacaatggctgcattggatgaaggcataataatttatctaagaacagcagcaatgatgatgaggaggaggaggagaaggaggagggacttttgtgtaggacttgctgtgagccgtgccctatgccaaacccttttacaggaaactcattaggctgtgtgggtgtgggttgtctgcccacctaagtgagacactgaccttcccttagggtgccccaatgtgatttaggggccctccaagttttttgcagttgcccctgggacagatgaggaggatcccagcagagtgaagcctgcaggtaccctaagcctagcagacagaccgggctcacctgggctgcagagcctggagctgccaccttcctgggtgcacctcttccccctctatattccggaaggcctcccggagtttctgaagtggctagaaattactatgtgacagtgtttttgtttgtttgtttgtttttttaaaaaaagagccttaggatagtgtggcagatgtctgttaatgacttcctgggtatgagatcctgggcttgatactgagatgtagaaatgaataaattatggccactgccttctaggaactggtggaaaagaccatcttggaatccttataagacagggctaaagcttagctgtgcataaagccagggacatggtccaggctcatttctgttctcaccactggcctgtgtatccagttcattcccactcccccactgtcaaccacgctgacttttagcagggaaggagttggtgtgttcagagacctggccctcagggaggtgtgagatggacagggaggggggtcaccaggatagagacaacacaaacaggcatcacattccatgagaaacaaaagccggaaggaggttctggaggtggcagtgatgtgagactttttgtcccttactcgcttctgtattattgggtttttctttgcagtgagagtgtagtcatgtattatttgtataaatagaatcatttaatagacaaacaatgtaaggaaacagttttgctctaggcttttcaaagattcatctccttacacattgtatcatccctaagtcattgcaacgtgatgattttgcagtgagaaagatatggcccacattttaggtgggagagaagggagtggcctgtaaagtatttctggcctctctggagctttgcaaaggtttcatgtgttcttgcccatgcagcctgcaggttttgggtcccagcgctgcatctgaaggggtaaaagcgtggtgctaagtgatgatctggaaaactgagcaggttaaaagcatagaatgtgatttttccccacgtgaaatggcattggatttttaattatgtatttaacttttgaaaatggtaagaaattcccaaagtgagcagcgaggtggggagtgagtagcaagcataaaccaggtctctggctatttttaaagtgtgactgcctcagcaaagtggagttttctgcaaagtggagtcaaggatagcagagagtggcacagacaaaaccccatagaaactctctctcagactctggggtaatgggggcactgacctaaataaggacaggaatctgccaagtacaatgagctcaggctgcaggacaggctgaattgagggcgctgtgtcttccattcacacaccggccctgtgtgcattcaggccccagatgacatgtaggccactgccccatgccagccagactgccccagccccacccacagaagctttcctggttcaaagggcttgattgaagattgagtgataacagggctaaatccctgaccagaaacactagccgagacataggattttatcgtaataatcccaagaaatgagcgaatctccttgggctccagggctaggtcagagagaacagttctcagtggactgtcagccatggggctgtgtgcaatgtgagccacatatgcaattttaaattttcttttaaaaaggcaagaagaaacagacaacagtcattttaatattttttatttaatctagtatatctaaaatattaacacttatgcacataatcaatatgaaaactattaaggaaatgttttacattctttttgtgtactcttcaacatctcaactcagatctgccgtatttcaggtgcccagtggccacatgtggcttatggctgccatattggacaccagcactagaagccatacactcagcaccttacagagtggggctggaaagctgcaaggatgctgtctgggcccatgaaatccttgcatctcatgtagagtcctcctaatattcatctgccattaaaaacaaaagcattacaccttcataagttataggtaataagaattatttacattttcacaggcccttccagttacaggacactttggtatgttttcctgtgcacctaaaaactctatgaggaggctgagcacagtggctcatgcctataatcccagcactttgggaggctgaggcagtcgaatcagctgaggccagcagtttgagaccagccaggccaacatggtgaaacaccgtctctaccaaaaatataaacattagccaggtgtggtggcgtgcacctgtaatcccagctattcgggaggctgaggcagaagaattgcttgaacctgggaagtggaggttgcagtgagctgagatcgtgccactgtactccagcctgggcaacagagtgagactctgtctcaaaaacaaaaacaaaaacaacaacaaaaaaaactctatgagggaggcaggcagatatcattcttttggcaaaaatttattgagggtctgccaggtgctaggccctaatttgcatacaactcctgcattcctagagtttggattctagtggaagaggaaaacaaatcatgatgtcagcgtggttcgaatggtagtgggaatatgagtgcagctcggcaacacatgagaaacctttaatctgcccatgatatcaggggatgttcttcaaaggagggatatttgattagaaaaatacagaatgaggagctctgtgctgggcagataagtgagggtggaaggagcactgcacgttctgaacatagtccatttggggcagaacttctgaccctggtatgtccattttagaccccagacaggttaggccacctacttgaaatcctaccacgtgttcacaggagatggggctggaacccaggagtttgagctggtcagtcctcaagcaacaattcatcttgaaaaggtggttctttatgcaaggtctttaggacggggataagcgtgggaagggttccagccctagaacctgctcgatcaggtgacctcaattccagggtcctttcctgcgtgcagctaccatttttggttttgaaatctgcagaatattttgaatacaattctgctgtgtcatcatgctaaagttcagtaaggatgtgtgcttgaagtctgtttataaagtgtttctactttagtaatcctcgagtcttagaagaagagtcaccatttcctggagattttgaaccccaggtgaactggctgcttgtctggaatctcagtgcaggagttttttttttttttttttttttaacctagacagggagccagtctcttgcctttgttcacacaggccattggccaccactagggcagaacagagacagtgccagtctgaagcctgcggccctccaggaacggtgcctcctctgtactcagcagtttttatttttatctcatcagcgtgttcctccttttgaagtgtgaatcctagtgacccaaatgagctgtctgcctgggcctgggccaacaggaccaggttacttgagttcagtggagaccctgggctgcggtggcagggatgctggttcctgtgtgactggatgggggtggggtaggcaggcttactggggccagaggcacaggcagcctgctcaactgacaaattttcaaaccaggaggacttcatgctaaaaataaactggatcctgtattccccctccctcatttgcttcacagcagccctttacaaagagtaagcagcatttgcacagtttagatgttaacatttagaagtgcagaattaagcatgtgtacctcacagtgtttggctgtggatgcaattcaggcccagtggctttgacagttgtctccatgctgatgcattggaacagtgtggtggagagtggtttaatactcagtggttgggcattgggggtgtgctgtgtcactggaattgagtggtcagcagtggtgcctgatgctggaggcagggagtctggtagagtttgagaaacaggaaggcagatgggccccctatccctctgttggctgatgcctgagacacacttggtttagagggaagagaaagaatacttgtgggtcctctatgctgtaacaggaactgtactaagtacttttcctgtgtattcctgtgagttccacacaactaagcatatcctcattagaggcagtgatgcttcaagggtggttcccagacagcagcatctgcgtcacctgggaacttgttaggaatgcagattctcaggccctgcccatggtctatgaaatgaggattcaaacggggtccagcagtctgtggtttaacaagctcctgggtgatccccgtgcacgctaaagcttgggaacctctcctggagaggtagagcgcagacctggagctagactggtctcaggcctcaggtgtttggccttcgacaagttgtgcaaccatttctgtgcctcagtgttctcatctatgaagtgggggtaataacaatggggttgtgtgggattacattaagcaatgtatgttaaaaccagccatggtactgggcatgtggtaagcataccataagtgcttgctgtaactcactagctttgatcccatgtctgtttaacttcaaggctgtttactcattattttatactgactgtctcttagcaacctaactcagttagtgattcaggtgtctaattctgcaaaaacaaaaacaaaaaaagtaggttattctataggtcaaggctagcaaggtggtttcctttctcattgccggctctgtttctgtagtaggggccacctggtgccctgtgaggaggattgtagagccaagcctgagctaggcatatacacgtgtgccgttattgatgagagatgtctgtcgtgggtgtgcaggggtgtgatgtgccctcctctgctgatgctggtttttgccagtcaacttagtgtgaatttctgatcctttcctgtagctgggttttaatgggaggctattaagagccactactgaataccgcgggccagaggagtcatgtgggctgcacatgtttagggccaattatcaggagactgcatgtggtttctgggcagatctcgcgtgaactaccagagcaagaactcactcattactgtgggaagagtaccaagccattcatgagagatccacctgcatgacccaaatacagatatggaaactatcccatttctgtatatgggatataagacacatatcccaatagacaccacctccaacattagggatcacatttcagcacgagatttgttggggggcaaacatccaaactatatcaggcacctcgtgctggttggctgtggagatgactgagtccagccagtgcagagggaggaaaagctcccttagagggtggaggaggtctcgggggaggatggagaggacgttgaggcaggtttggacttcctgcaggcagcgagggtttccaaagcagacaggcagctggagatgaggtggtgggtgggtaggggaagtggagggaaggcaggaccccagttttaagagttaattgttgtaacagagcaggaaagtgataataagggcccagaaatacaggttgagtgtttgtaaagaaaatttcaaacttgttactgatgggttttttgagtgatttgaataaaaggaaaaataaaccagattccttggtggagaagactacatttcataaagatgacagttcttctaaaccaatgcaaagggtatttaatatgagtccaatgaaatccccatggaatttttaggaacacaacaaaatagttctaagattcctctgaaagaatgacagctgaaaatagcgagaggattttttttcatgaaagaggataatgatgtctccttcagcttgttccctgcataccttccagagctgtctttttaaaacatgaatcaaatcctggctgcttgtgtcatcctgcggctattagaataaacctgagcccttccctgggacctgtgtggcctgcctggctggcctttgacacctcctccctcactctcttgctctcccagctccagctgtcctgccttccctctcctcctagaaaacatcaagcttcttcccacctgcgcatttgctgctgcctccgcgtagaccttttcctttctcatgactcacttgttcttgtgatgttcttgtggcctctgctcaaatggcttctccaggaagccttccctgaccaccccatctcctaacacttgttcctgtcatttcttctcctctattttcatctgaattacacactttatttatagtgtggtggctcagagcataggctctgacctgagctgcctgcatttgcatctggcttcaccccttactgctgtgtgcccgtctaggcatcagttttcctcatctatgtaatgggaataacagtgtctatgtcatagggctgttgtaatgtgacatgaaaagagcctcacgagcctgtcacacagagtcaacagatgttgttgcttgttcaaccttcattcaccccacaccagaaagggaagcaagacagaagcgccttgtctggttcactggcagtatcttcggtgcccttcggtgcccagaactatacctggcacattctgtggcatggtaaataactgttgaatgaatagcatgatagtaaaacatgctatacatgcgcagtgttaaaatagcaattggtgtctgagtagagatacagattaaaggaacagcataataactccagagccaaccctagcatttatgagaatttaatagatggtgaagcagcggcacaaattagtagggagacaagaaggataatttagtaaatgaccgatgaaaaaaaattagatcctctcctcacaacatttatcagaataaattccaactagacatttcaaattctaagaaaaactaagaaaatatatgagggtatcttcttttctagggaagggttgtctttttaagcacaaaaccctgagaaaaaaatcagaaagaagaaagagcagtgggttcgactacttttaaaaattaccttttgtggctgggcgtggtggctcacacccgtaatcccagcactttgggaggccaaggcgtgcggatcaactgaggtcaggagtttgagaccagcttggcgaacatggcgaaaccctgtctctactaaaagtacaaaaattagccaggcgtggtggcaagcgcctgtaaacccagctactcaggaggctgaggcaggaaaatagcttgaacccgggaggtggaggttgcagtgagccaagattgcgccactgcattccagcctgggcaacaagagcgagactccatctcaaaaaaaaaaaaaaaattaacttttgtgtatcacaagcattagaaacaaaatgtaaagttaatgtagaaaaattgcctcaagtgacagaaaaaaatgtttaaagcctgtaatatagaaattacttacataaatctaaagggaaggtcatttatatctcaatagaaaaattagccaaaggaaagatatagaacctgcacagaagaaatacatgcagccaagtagctataggggaaatgtttaacttatgggtaatcaaacaaatgcaaagtaaaatgagatgtcagttttcctctatgaagtaacccagtggggactgtgttaagaaagatacatttctaaattgctggggggagtgtagctagaaatagcttttctgtcacacagtttgaagaggcttaactatgtacaaatcttttgacccaataggtccacctctggaaatccagcttaaggagatcgtcagaaatgcatcccatatatatgcaaagatattcattaatcataagtcagaaaaatgtgaaaaaattaaatacccagcaatagaggaaacagtaaattatagtacatatacaccagaatacaatataaccattaaaaatattttttaaggttatttaatgtagtggttcttaacctctgtttgcatcatgcttgctaatgtcccattggccaaaggaagtcacatggccaagcccagactcagtgggagccgactacacaagaggtgagtactagggggccactgtgtaaccatctaccgtatgtattcatgatatgattgcagtttctaaatataagacacaaagacacatgtacatgtaggaatataccagtatgtaaacagtggttattttaaatttattatttgtattttcaaaatttcctataacaagcatatattttatcatcattaacaaaagtataccttaagaaagcatggctgtggccgggtgaggtggctcacgcctataatcccagcactttgggaggccaaggcaggcagatcgcctgaggttaagagttcaagaccagcctggccaacatgatgaaaccctgtctctactaaaaatacaaaaattagccaggtatggtggcatacgcctgtaatcccagctacttgggaggctgaggcaggagaatggcttgtacctgcgaggcggaggttgcagtgagcccagatcgtaccactgcactccagcatgggcaacacagcaagattccaactccaaaaaataaaaataaataaataaatagaaagcatggctctggatatggagaagctaacctaatatactatgacacattcaggaggtggttgagtggatggaattaactggcactggtggctttttagatgtggtggatgaagtggggaatgggggcgttcaagaatagtgtgactcgggcttggtctgatggtgtctgagatggggaaaagggatgtggtgcaatttgcttggaaagtctcatttaccatgttgagtttgaagttcctgcgaggcactgtagttagaggcccaacagatgttgaaaagacagagttggagttcagaagcaaagcgaggattggacagaaatattgttcagattattggtggtcattgtgagggagaaaacgtgattgcccaggagtggcatagaggaggtcggaaagagcacagaagacaggtccttgagttcaccaacattgaaggccctggcaaaggaagcgtcaggccagctctaactccagacactgcttcagtgtgactccactcacaagacctttcctgcccacagccttaactaccccttaccccatcacatgtaggctcagcatcctatgcttgtcatttggagggtctgacatgtttgtcatgaaattgattggtgggcgtgtacccccccggattgtcggctccacaagagcaagggcagggcagggtctgtcttgtcctctgttcatcactgttgtctacagcagtgcttgacacaggttttctgggaggctgagtgaatgaaagcatgtggcagccaaacctgggaagtgatggataaggggggatccataggatggataagaattcagagaagatgttggtggtccaggagagttttgagagaagagtttcaaggagacagcagacaccagtgccaatgatgagagatcaagaaagatgggctctggaaagatctagaaagagcaagctgtcttagagtagggatggaggcaggtcctgggggaaaggaatggatcgattctgtccagagcacaggtgggttcactggtcttgggaaaagccgtagaagctcttcagagtgggcaggacagcaaagaggatgggacaaatatggaagaaggaaagaagttcacatagtaaactgacatcatggctctgggtccactgggctgacatttggtttttcagacagcatccacaggaagtagctgtcctatttgagagataatgttgggctgtcccatcttgcacccccacaaagccactggctatcccccagagcgtgctgtggctcctcatcaacaggtctggtcagggagatcatcagtgattctgtgtaaagttggctgtggtgtagtcttcgtcaaagtggcatcttaatttggtcttatatcccattcagtctggtcgcatctgcctctcctgggaacttgttggaaatgcaaattctcaggccctacctcagagagacttaagtaggaaagtctggggctggggcccagccgtgtgttttaggaacattcccgggtgatgttcactaaacatggagaacctttatcttactccagaaatacaagccagcagttgttgcaacctaactagcgctggctgacattgacgcaggagcttcccagcaggaatggatgtttcttcccgccgccttcttggaagtgcttttgaagttgactccactcagaacctcctttggaattccctgagcggagagaatcaagctggtataattagaggcccctgtcatgcagccactcggtattacggggtcagcagtttctgctgggatcccaggcagctttccaggcttgactctgatctgcacatgaggttctgagccagtgaggagctcctgggcccccctgaatttggtattttaaattgtagactatgagggaccagaggggcctcaattgcaggctggaggatagggtttcatgcatagcagctggaattcatagcagtggcgtctgggacccatagctttgaagacacgggtgagatgctgttgcttaacgataaccagacacgagccgagcccacccgctgctgccctccctgtgactctgcaccccgcagcgctgcaccagggcagtaggcgccttggcgccatgcggggtcatcaagcccctaaatgcaccctcctgttccccaggagatgaaagccgatttggcggggctgggggctgctgctgctgcttttaaggggcccaaccttttaactgcagctctcagtatggacatccagcagcagatgttaattgctggagaggtaggtggaacgttttcctctttgtaatgcagatgcacagatatctagaggccaaccagatccccacacatccggaagctgattccagaaaccaggtttgaaatttcacagccagccaaagctctcaatgcagaataagtgcccatttgtccctgaagagggatgcccacttgcattctcaaagcctgtaggcaccatgtgttggggccattgctgcctgggatttttgtgccagtctgttctgcactgttgagtgcagcgttgtggttagatccttggggagtaagggctggtccccttcccctgatgttagggctgtttctgggtgggaggtgagagcaggcaagtgcctgcagtatctctgggagaccctgctccccttctggaaaatctctgggcctccctgcagactgcaggcatgtgtccaatacaactaaattcttttacattttgtacacttctgtgggtaagtcttcctttttagccaaagacaaagagaggatgggagccctacctcctcctgggtctagtttacccatatgattttgagccaatgggtaaatcttttcaaatacctttttttccctctctctccagtgagtgggctttaatcatgcttattacagctggtgggcccccacataaaacctttggggcaaaatattgatagtagttagatttgggaatctaaaaatcctatacatagtattctagtttatccagagaagtatatccaattatcaaaggagaggaaggagagaagaggttccaaagctcagctaagttgtttattgactgccccgcacaaggctgctgagcttagaggacctttccatgtgactcacagtggtggagacagttccctggaactgttcccctcctgtcaccattgctcactggttctgaggaaacaattggcaatcgtcagtaaaatcttcagtctctttagtgctcaagtaaatgtaaatttaaactgcgtaataacaccttttccacctattggattggtaaggattttcaaaattacccagagcaagggagtggattgtgcaactgctagtggaattgtaaatctgcaaagcaattttgcaaaagttattacacaccttaaaaatgcacacagctcttgacctggcacacctgggaaggtattgtttgaaacaattaaagttgtgcagagttcaaagtttttcaccaaagcgaaaaatgtgaaatggccttgatgtttaaatgttcaaaaagacttattaaattatagcatgtatctatatatgtgtatatatctccattaaaattatgtcaaataatacttaatgacatgaggtcatatgacaatgaataataatgacagtaatttacaacattacttggtggcaacttaaaataacagacaacagcacatacaatatgattcccattttattaaatgtatacattcatattttaaaggtctagaaggatacatatcaagaccttaatggtaattcctaggtagcagaattatagctgatgtttcctttacttttttctgtattttaaaacttttctgccataactatatgctttataaatgactgcttttgttagtggaaaggggtcccaatccagaccccaagagtgagttcttggatcttgcacaagaaagaatttggggcaagtccatggagtaaagtgaaaacaagtttgttaggaaagtaaaggaataaagaatggctactccataggcagagcagcggcatgggccactggttgcccatatttatggttatttcttgattatgtgctaaacaaggggaggatttttcatgagttttcagggaaaggggtgggcaattcctggaactgagggtacctcccctttttagaccatgtagggtaacttcctataaactgtcacttacaaactgtcatggcactggcgagagtgtcttttagcatgctaatgcattataattagtgtgtaacgagtagtgaggatgacccgcggtcactttcatcaccatcttggttttggtagggttgggccagcttctttactgcagcctcttttatcagcaaggtcttcatgacctgtatcttggggcaacctcctatcttatcctgtgacttagaatgcctaacctcctgggaatacagcctagtaggtctcagccttattttacccagcccctattcaagatggagttgttctggttcaaatgcctctgataacttttaaaacaaataaccaaaagattcctgtgaaatgtgctcttataattgctattgtaaacaactccctgcccagagaacctaactggctggtttgtgttacagggagagaggggggattgctttttactgattagagaggccatgggctctaacaaaacccagaggtgaatttcacctggcctaaaaggaagagaaaccttgctaagaggtgaaaggtcagcagtgaatgccaaaggaggaattttggctggagtattaatttgcaatcacagaccctgtattgtgttagctaactttctaattttcagtatgctctgaaagcagaaatttctttttctcttgtgtgttcagttaatcactcttactctttcctagagaaatgaaacaagaagttcttaagatggtggcaatgagtggttgagaacagcagcagtaagcctggctgggcagaaacgatactctgattgttattaagaactgcgtaacggtccctaggggcccagggcagagccagtatcattctattttcaagtgcacgaggggggctcatttatactgaatacagtagtcccccttgtcctcggaggttatcttccaagacttcagatgtgccaaaccctatatactgttttttcctatccatacatacctatggtaaagtttaacttataaattaggcacagaaagagattaacaacaataataataaaatagaaaaattctaataggagggggaggaagaggaggaaaaaactaaaaaaaaaattataacaatagactgtaataaaatttatgtgaatgtggtctctctctttctcaaaacaccttatactgtacagactcacccttcttcttgtgctgatgtgagataataggaaggctgctaagtgtctaaaggatgggaagcatctgcagatgaagacgctgagcaaagggagggttcacatccctggtgagacacagcggtgcagtgtgagattgtgaattgtatatttccagaattttccatttaatatttttggactgtgattgactgtgggtcactgaaaccataaaaaagtgaaactgcagatatggggtgactgctgtactatgtgaaaatatcaccctctttttgctaaaaatatgtgatcaaatgtaaagttgggccttagaaataggcatgttatggtggcttgacaagcttaggatgggaacattagaaggtggaagagaagtaggctggtgggaaggagaatggcgattttgtccagatgaggagggaatttggttaataaaagcttaaggctggagcctaggagaaaggcctggaggagaagtgttaatactgggtttaggtagagcaagaaagtggggtttcgggttggtatctggaagtctgtaggaagttccctacagaaaataagagaaattatttttcctttgtgggaaatatcaaaaaccaaatcattggattgtaacatactttgaaatccatcttagaaaataagatggatcgatgtctgattgggtgggcagatgtgtgataatgataatgctaattgtggaatgtaggcagtgtgtctatgagtcttcaccatatagtgccctaaactttcttgtagatttaaaaaattcaaaatttaaacgttaggaacaaaagagcaactagatggcaaagcctaaactcgtggtcattttacaggaaaaaaaaaatcaagtaacaaggaatctcctatgaattccaaaatacaaaaggtggggaactggctgggtgtggtggtgtacacctgtaatcccagcactttgggaggccgaggcaagaggattgcttgagtttgaaaccagcctgagcaacttagcaagaccctatttcaaagaaggaaggaaggaaggaaagaaaggaaaggaaggaaaggaaggaaggagaggggaagggaggggagagagaaggaaagaagaaaagaagaagaaggaggaagaggaaggaaggaaagaaggaaagaaggaaagaaaagaagaaggaggaagaggaaggaaggaaagaaggaaagaaggaaagaagaagaaagaagtggggaccaaaaacagcccaatcccctaattactggcctgatagttggccagcatgcatttaaagagagagagagaaagagagagagagagagagagagagtgtgtgtgtgtgtgtgtgtgtgtgtgtgtgtgtgtgtgtgttcattctcacaggcttggatacacataaagagatatataaaacatgaaagattacagtatttgaggggaagctagtgaatggaaaggaaaggtaggaaaatcagacatgattggcccctggaagtccatcccacatggcctgagcaggttgcgggaagaagagcacaggaaaatggaagtacagaagggaacaggcccagctagagtcccctctgctaccaggtgaggtcgtggaggatggggatgctgtccccacagtagatgcagaaaactagtttgatcttgttgtttctcatgcttcctccagtgaaagccaagaaataatcaaagaacaattcaggaagaacaattgggaagaagggcggtaaaaatgactttttcctgaaggaacaaataccttcagatgatgtttgcagcattttctgattttattgagcagatggctccttcttgggtgaaagcatgttgaaaaacttaagggggaagggaaaggctcaagttccaaggagaagtccccaattcacttgggttagggaggtgaatggtaccagtcagagagccctccttgctttgaagacatctggacttgtatcatcataaccacgtggattaagaataaccaaaaagaacctcatggaagttccatagcttcatctcttgccaattggatgtgacactggggaggaagtttgggatgaaagaaagaggtacctgtagaagccctgagctccagtggcaaatggcactttgctctttctattcatttggccccgttgtcctcatctctagagcagagctaatggcatcgactccatctcatatcctgcagagaacatgaaaatgtctctgatgtctgtggttcagagtgtgtcagatggtattgaaaaatgctttgtccttctcctttcaccctctgcccataacaaacttataactacactgaattcggtttttgttttgttttgttttgtttttttgagatggagtctcgctctggtgcccaggctagaatgcagtggtgcaatctcggctcactgcaacctccacctcctgggttcaagtgattctccagcctcagcctcctgagtagctcggattataggtgcccaccaccacacaccaccacacctggctaatttttgtattttattagagacagggtttcaccatgttggtcaagctggtccagaactcctcgcctgaaatgatcagcctgcctcagcgtcccaaagtgtttagattacaggcgtgagccactgcgtccagccaactacgctgaatttgtaaattatcaaggtagtaatttttctcagtttgagggaagagtttcatccttcagtttaaaataacctaatatgtaatttcttttcaacattttatacaaccttatcttttggagctctgttccgtatcatcttttaataaacttgcattttgaatgaatgttacagctttgaaagtatttaagagccagctctatggtatgtgttttgcttattatctgtgtatctttttacttttagctttagaagatggagagcaaaactgttttgtatactcagctccagaaaagttataatattctttgtacttctttaagaaggatgagcctggattgatctggaattaaagtgctaactgttaaagaatgtaatcagattatttaataataataacagggacactgcaggactgcatataccagcctggcaccataaaatctgaactcagcaattccaccgtaacaggaacattttcaggttgtgggtcaatcatttagatcctgtttttttaagtggctagaataccagtgtgattttgaggaatgaaagctttatattctgatcagttctaaaaaaggtaagaatcatgtatgaggtcatgtccatttcaattcagataaatataataactgtcatttatggtgtacctattatatactagaagcaatatattgtaataaatgccatttcaatgattttctaaatagctgcagtcattatcctgattttacagatgagaaaatccaatctctgatcaaatgcctttttatgggacaggtcctctgtgtcccccccacagcacactggccacacatgtacctgtgctccctgtcactcatactcccttacctggctttatttttaatacatttatcatcactagacacattatatagtggcatttattttatattgtattcaggatcgttaacccttgaacaacatgggggttaggggagccaacccgccctcccctgcaaaattgaaaattcacatagaacttttgactcccccaaaacataagtactaccagcctactgttgaccagaagccttactgataacctgatagtcaattaacaagtattttgtatgtcatatgtactgtatgttgtattcttacaaataaagtaaactaaggaaaagaaaatggtattaagagaatcataaggaagagaacatatgtttactagtcattaagtgtagtggattatcataaaggtcttcatctttatcatctccatgttttgagtaggctgaggaggacaaggaagaggaggggttggtcttgttatctcagggtggcagaggcagaagaaaatccacctgtaagtagacccgcacaattcaaacctgtattgttcaagggtgaactgtatatataacagaaatattgcacattatataattatgtgataattatataatgtttgttgcagatccttcctgtctcagtgtttttggagtacaataacaaaatactatatactgggtgatttataaacaaaagacatttatttcttacagtctggaggctggcgagtctaagatcaaggcaccggctaattcagtgtctggcaagggcccatttcctagttcatagatggcatcttctagcggggtccccacttggtggaaggagcaaagcagctctcttcgtgcctcttttataaagtcactaaaccctcatgtcctaatcacctcccaaaggcctcacctcctaatgccatcacactggtcattaaatttcaacacaggtggctcacgcctgtaatcccagcactttgggaggccaaggcaggcagatcgcttgaggtcaggagttcgagaccagcctggccaacatggcaaaaccccatctctactaaaaatacaaaaattaggcaggcgtggtggcgggtgcctgtaatcccagctacttgggaggctgagacaggagaatcgcttgaacccgggaggcagaggttgcagtgagccaagatcacgctactgcactccaacctgggcgacagagtgagactctgtctcaaaaaataaataaataaataaataaataaaagtaataataagaaataaattttaacacagtaataataagaaataaattttaacacagacctcagcacctcctcactattgcatgctgggtggagctggtgtgcaagggctcttgggagctttttgtgcgcatctcttcccagctccacactgagtcacaccagactggtgacttgaaatgggccttggtgggagtatgtaagacaccacagaaattggcaaatgaggcaactcctctgcatcccccacccctagagccagtggttaaacattgacctgcaggccaccactccccacccctcattagaacgtaagcttcgtcagagtcaagattctgttttgttccttgccctatctctggtgttgagaactatgccaggcacatagtagatgcgtagtaaatatttgttgaataaataaaaagcagtgcatgcttttaaattatacaagcttggcctcatccctgtgtggaccctgaataagccacttcattgctctgaagctgtaaaatagaaatcgaaatccctgcctcttcagttaaggcttaaggtatcccaaagccaagggtcagggggagaaggatgaaaagttaatattgtagtgtacaaatcatacagtcagtccttgaatacttagtttagctttagaatctgcagtttgttacaactgtgtctgcaaggagaaacttgcagatgtaagtaaaataatataatcaaggcttagcagggtaccaacatctggaaaacactttcaactgaatcctctttctcctcttcattggttctttctacatttcagtctgttcccctgccttttcttccaaattttccaggaataaaattgcctagtctactttagttttatctcctgcagttaagccaagtcattaactttctaatggactttcctgtggagcctcagatcttaaattaggttaaatgtttcagctttttaaaaagtggcattaaataggcaatttgctgttgggaaaaaaagcttgtatatggaagtgtttcctagtctttggtcagcagccagcctgacttttactgttcatcatcacccctgttcagtgggatctcagtggagtgaaaggtttcaagttgactggaagcagagctctttctctgtgccttcccaaggtgggtatgagaaggagagatcgatcctttacacaggtggatagaaaacgggccgacagtcagtccactcataatagctggacaaatgtttccttgtttaaggatgcataaagactaaaaaaaggctgtggaaaagtcctgcagaacaaggtaaaagcaagagcttctgtagactgagatggagtttctattttgaaaaaccatctacagcagactccagaagatagttttgggaaaatatgtggcatcctcagtatacagcaaaaggacatggtctcccagggccaggaacagtaaaacgtgaagaaaggatatttgacatggaaaagcaacagaaagggaaaagcaaggagatggattccataaggaaaggttttaaggatccaatagcagaactaaaatccaaattagcaagagtatagaaaagtattcatgtatagtaaactgaataatggcctccaaaagttttccatatcctaatccttggcacttgtgaatgttacctcacatggaaaaaaaaaaagttttgcagatttgattaaattaaggatcttgaggggtatgggggttatactgggtcatctatgtgggccctaattgcaatcacaagtgtccttgtaagagacaggaagaaggagatgtgatgataggagagaaagcgacatgaccatggcgacagactggagtgatgaggccaaaaacaaggaatgcaggcagccaccagagacaaaaaaaaaataggctctcctctcgagcctccagagggagtgcggccattccgatagcttgatttcagcccagtgagcctgagacttctggcctccagaactgagggaatgactttctgttgtgttaagtcaccaagtttgtgataatttgttagaacagccacagaaaacaacacaaatgccatggaaaatcaaatcagtgatatgagtcagggtgaaacaagtcgagaaagattctggaaaatatgagaaaagaagaacaagagacagggttatacatgtggaagatggaactgaccacccacattcagatttttggcgttggtgattattgaaatcagtgatccgtcatccaaactgtgatggaaggaaaccccgtgctcacgagggactgtgcgtgaatatcaaaggcctcactcaaccacattctgaacaaactcagaaagagacggccacatctgagcataccctgggaataataaagaataacaacgataagagggggacaagcatttcatccaaacagagaaaaaagtaacaaaaattaagtcgactttagacttgttctgtataacaaagagactgtgtttacagaacctgtcagaagattaaaacatctgggaattaaaaaaaaatttggctctattcccaggccccataacaccaacctacgtgtggagcctgagaatctgaagcattaaaagttcttcgattatcaagtaagtttgtgaaccctctacaaaatttgggggttatgtagcaacccaaacaattttatgctcagctgagttgccttttgtctgtgaagccaatcagaaagacattctcagatgtgcaggggcttagggaagtatacaaacatgctcctttctttaaaattcactttaaagacatgtcttggatgctcaagagttaaaacagagctcaagagtagctaacataagcaccagattccataaaactagagagcagtttaaattattgttataagtctgattagcaaacaaatgcaaatgtcaaaaattgttcttacaataaactatgtaatggaaagacaaccaaatgcctgtattctggatctaagccttagagtattgctaatgaagatcaaagagggaaggggagataagggttgtaatgctgcttgtccgaaatgggatggtatcaagaaaaagttgtttcagtctttattctaatcctcaagaagtgttagtggctaaagaaaggctctgaatgatgagtactaatagccgccattccgagaggcttatgagggaagcagcgtgctaagtactttaccttagtcacctctgctcccggccacagaagcgggcgtcagtctctttctcttcccacctgctgctgagttcttcaggttccttaagaccctgcagccagtaggcagtgcagcttgaactgactcttgtttcctacattaatatgaaaaacttaaagtgaacactgatagatccaaaaacatgttcaggaactactcaaatgcttgggaaatggaaacgtgaactcagcacaaagtagacccaaaagagtctcaatacactttactaatcaggaaataaatacacagggtgcttcccctaaatagagtgcactagaactatagaaaataaaatttaaaaccaaactacttagagatagaaaaacacaattcaaataaccattgaatccaacaagaggtcaacactacaactgtagactacatagatagtaacaagaagactgcataatgaaatttgaaacaaggataaatacatacttagagaaaaaagtatggctttatatatataataaatcatttaaacaaaagaaggtgacagagaaaccaaagaaaacagtggaaaattggagaaaggaattaagataaatgtgaaccttaattagaaaaagaatggtacaattgataaatcctagtgctaatttttcaggaaaccaacaaagtagactgatttctcacagatctaattttcaaaatgagaaaaaatatctacccatcttaaagaagggagggggggtggccagaaacagatgcagaggtgattattaagtttaaagtgattacttgtataattttgtgctcaaaatttgaaaatctgaatggattggataattttcttaaaaaatagaatatactgtaattgattcaagcagttgaaaacctgaatggaataaaaaacttgggcactgtcatcaaagaagtttcctgcccagattgttttgcagactaattctttcaaacccgctaagaacagttactgcccaagctaaattccacagagattgttctgtgctgacatcctaatcccgcacttggctttggcaaggaagggtgtcttggcagtgacaggatgcaacgctgtcaaggacatatttaggaaaagcagctccttctccagagctcatccctcctcctgggcgtgtccactgatgtgcagatgctgacggcccctgtgtttcctcagctctgagccaatagaggaggaaagtaagcatgggggaaaacaggcctgcatgtaacacccatgatgtcttctaaaatttggtgataaaaacaagagacaagaaatttttggccaggcgcagtggctcacacctgtaatcccagcactttgggtttttttggtttttgttttttgtttcgagacgggagttttgctcttgttgcccaggctggagtgcagatgcagtcttggctcactgcaagcttcgcctcccaggttcaagtgattctcctgcctcaggctcccaagtagctgcgattacaggcacatgccaccatgcccaactaatttttgtatttttagtagagaaggggtttcaccatgttggtcaggctggtctcaaactcctgacctcaggtaatccgcacacctcagcctcccaaagtgatgagattacaggcatgagccaccacacccggcctaatcccagcactttgggaggctgagatgggaggatcgcttgagcccaggagttggagaccaccctgggcaacacagtgagacccccatctctattaaagaagggtggggggattccttcattaatttcctcagaagttaacctggaactttgcttgaaagggaaaagaggcgtgttcagacatctggattgatgccatttgtgaatctgactttcatgaaattccttaagtaactccaccccacataaaacaaatacagactgggcatggtggctacccgccctaatcccgcacttcgggaggttgagacaggcagatcacttgaggtcaggactttgagaccagtctggccaacatggtgaaatcccatctgtactaaaaatacaaaattagccaagcatggtggcacacacctgtagtcccagctactcaggaggctgaggcaagagaattatctgaacctgggaggcagaggtttcagtgagccgagattgtgccactgcactccagcctgggcaatagagtaagactccgtctcaaaaaaagaaaaaaaaaaaaactgctgtggaaaatcaaatcagtgacgtgaatgaaggaaaaagttattctgcagacacagctggggccaggcctgccaggattttacacagttgtgtttgattaagtcctcctcaaccacctacaataatggataggattgtgatagataggaggatattcgtgtttattgatgggagaatttgaaacataatcaagataggggctagtttttgtcatgtgaggagaagtgtgccaggcattagggaggttccttgggttacctctgggactcagaaatgaaaggggactattcctagttttattactagggctgttattaaggatgaaaattgattaataggtttgtcacagagacatgtgagtagagagtggccattgcccctggcctccgggccctggctgtgattacacctttgctccatgttctcctcttgggcctcctctctcccttagagagaaaggctgcctggagagcccctttccccaggtttacactgctgaacccctcttctaaaggcacgtgcggaaaccccttccctgtcacttgctgtacagtctgggagacagtgtgggctgatacatcaggtacagggcctgtgtcgccagcattgctggaggtgctggggtttggtgtgggctcttcaatttagggtcttcacattcttctctttttcttgcagaggagggtgtggaagtattatattataaaacaaaactagtccaggcatcattaacaactttcatgatctttagttttcttccaaatcctgcaaatggtgattatactctgagagaaaaactgggtcccgtgactatatcatttggggagggagggaaggcatggaggaaagagagagaaagagaatgtgaatgcacagctttgagagggactgtttgtgctttaataattgccttcacttggataaggctaaatacctgctggctttgcgttttctccttggaaaatcatgctgtgagaagccacccaacatgttgtacctagattttaatgtcgtcatttctcctccttcacttctatccacttctcacccactgaaacctggcatcatctccaccaccccctgcagccgctctctccaatgccaccagcctttgcttacctggcattctgtaaattctgaacaactggctacctgccctcttgcagcaccccctatggctgctggccgtgttctccgggtttcccttctaccttcctggcagtccctttgccgcttccataacagcctcccattcctgtttccagctgctaattgttgatggcccttgggcacctaccctggactgtcttctctgtcctcacagcctcctggatggtctctccccttcatcaccatcctcccgctcctgatgtccaaatctatagcccaggacttgctgaggtacagccagttacctcctcaaactccactcaaaggtcccaaagccctgaaccccagtgtatccaagaccagactcgcatcttcagccctgcttggctccctaagtagatgatcccttcagcccccagtttcacaaggtggaaactggagtaatgtttctttcttgttcccctcatctgttcattcatcaggccctaccagctgctcacctgtgtagaattagcccagtgccatttgcctgcacaggccaccttcatctcttacctggacccgtcctgggtctctctacctccagcattgccacccccaccccatccccatccattctcaacaccatggccatatttttattagttactttctgtgcccccgggcctctgccacatcactgccctaaattatttgtgactactccttgccagactccttgatgtggcttgacagaccctctgagcagggccagccccacctgtttctgcagaataatccttgagttcctacctcctaccttcagtcctgcctccccatgtccatggtcagcatgcagtccctgagcaggccatgctcactctgtccccttgttcctttgctcttgccgttcctgccaccctacctggaatgctcctgtcctcccctctgctgtgtaggcctgaaggtgtgagctgatgggctactcctcaggaagcctcccagctttgtgcagtgcccttccagcaggcacatggcgccatgtgtttgcctcctgagagtgcccatcacgcggctgatgcacttacctggttcctccattagactcagatgtctaggggcagaggctgcttttgctcatcagtgtgtccctagcacccaggagtgcctcgtgcatactgcataaccttagatattttatccatacagtgaatgaatggatccatcatatagcattcattgtctgttacatattgctgtgtctcatggactatactatgtcatttaataaacgcagtgggaactcaaagtgccagaatcctcagagaaagggagccagggtgaatcctgactctagcatcctttaggttgtaatctattctggaagcataagtgtctctatagttgagggtttatcctttaagtgcttttgaagcatccatagagttatcccatatctgtctttttgggggccatcgaggcttatgtggtccgtgtcccatgccgtcctggactgcaggggtgccctctggcttctgtcacctcagtgctgctgcttgtcttctgtgctgtcagtgtctgcctggcactttccccatcaccctctctaatcccattgtagatcttaactgcacgcattctaggtctttctaagtgttgctcatcctgacttcagaacttgcccttcaagctgtcatttatctaaataaatcattgctatcagctgcttttgtgtgatttgccactcttctcaaagtagggtacagaaaaagaaattatagttcattgcagctttcatctgcttggggctgtgctgttctcagaggatgaggaccaagctccaggccgctaacagacacaacctcttaggcccggatctactggtccatgttggaacccaggagagtctcaggaagacacctctctcttcctcgggcatacgctgaagcagcttcctaacccctgcgggcccttgtggagggcaggaactgtgtgttcatcttgtcccccagacacacggcagtttctgaaatataggaggtattcagtataagtttgcagaatcagcagaagaaaggcggggaggaagaggcagaattgaaaatatgagataccagattcccttccagggcaaaaagttagatggtgtcaagtggaggatttagtacgtgggcttattgctgcttcatatgtctgaaatttcctcccagggagtatctgatatgctagaagaatctgatatcataaatactgaaataaataccataaactggaagggtttccaataaggttagaaataaaatcaggacagttatataacaggaagcacctcagaatacccttaaggactgcaactctcaggaggacaaaacagctttctgaagaaatccaaagttatgaacagctctagcagtagcttcttaatattaatatgcactgccctcattttgaaacacttaactgtgtagatctgagtgtcttatcatcttctctccctctgcccctaaagctattccatttatgttgctgggtttttttttttttttggttttgttttgttttgtttttgtttttgttttgagatggagtctcactctgtcacctaggctggagttcagtggcacaatcttggttcactgcaacctccgcctcccaggttcaagcgattctcctgtctcagcctcccgagtagctgggactgcaggcgcccaccaccaggcccagctaattttttgtatttgtagaagagacggggtttcactgtgttagccaggatggtcttgatctcctgaccttgtgatccacccgcctcggcctcctgaagtgctgggattacagacgtgatactgcaccagcccttgctgggttttagtagtataagaatgtctctggtttgtttgtttttgcccctccccctactcctaatgcataatactatttggtattggttttagagcagaaaataaatgggtttttatctcatatgccgatttcagtagattggttgtggctcactggagtgttgagaagaatttggaagctgaatctaagttcagtgggggagagttctgtggaggctggggggttggagggtagcactgtgcatgccaggcctgtgccaggtgtgttctagaggacagtaactcatgagagcaggacatggcatccttcaggttttgacttaaatcagagtcagttgaagttattttaatgtcattttcattttagagcctgaaattgttggttttcaaatcttgttctgctgtggcttgaatgtaatatcttagtgaatagtagggagaaaaatagagctgaatattttaacagtgttgagatcttttctttaagctgttgccatttgatacctgatactaaattggacttcatgaccataaaaggggcaggaatgggagactatctgaaaagtccctccagtgtaaatatttatcatggttatttcagaggcagattaggcttctgaaatttgagctacaactggatagtcctaacttagcatataagttgctgtccagattggtaacctggaatctagatttgcacagtgggaatcagaatgtgctgaggagtggccaatggccttgacctgccaccaggcatatttcatgaatgacagtcagttacataattcacgtagtacctttcaacaagggaggatccacccagtcatcttgtttgaggcattcttttcagaaggagaaaccgaggcatggcctttgctattacccattcaggctggaatgtatgagctatgatagcaacttggcctgaaggcctccaggcctggtcagcaaataaattccttgagcgctttccatgtgccagttgtagacaccacaaatgtaattatgagcaagaatgtctcagcccccagcctcaaggagcttccacgcttgttgggaggagacagacaaaagcaccccgatatactcatgcttcaaggtagcacaaagaccactgaagaaaataacatattgtgatctgggatgctggtttaactcgggtgtccagggaagtttgcttggaggagatggcactcccagttagactggaatgaggggatgagacagatggtgttggaaagatcctggggaagacccctccaagccagagaaacaacaaacgcaaacctgcctaagagatggaacaaaagccaacggggttggagcagagagaacgcccacactcctgtccatgagcctggatgtttgctaatttgttgtttgttttgttttttggtgggttttttgttttttgtttgtttgtttgttttttaagacagagtctcgctctgtcacccaggctggagtgcctggtgtcatctcagctcactgcaacctctgctttccaggcttaagcgattctcccacctcagcctcctgagtagctgggattacaggcgcccgccaccatgcctgggctaatttttgtatttttagtagagacagggtttcaccatgttggccaggctggtctcgaagtcctgacctcaaatgatctacctgccttgttctcccaaagtgctggaattacaggtgtgagccactgtgcccggcctgatttgttgttggtgttggtggtttcttataagccttgaaaactttcattgcacttcttgaagctgcttttaaattagccattgtatttggtgagacagtgtttgcttagttgtacaaagggtatgaagaattctataaattaaggtgaacttaaaaattgcctaattctgaccagatgtggtggctcacacctgtaattctagtactgtgggaagctgagggaggcgaatcgcttgagctcaggagtttgagaccagcctgggcaccatgatgaaatcccatctctactaaaaatacaaaaattagcctggtgtggtggcgtgcgcctgcagtccgagctgcttggaaggctgaggcaggagaatcacttgaaccctggaggtcaaagctgcagtgagccaagatggtgccagtgtactccagcctgggtgacaaagtgagaccctgtctcaaaaaaaaaaaaaaagataaattgtctaatccctttggagggaggcatgtgcttcagagtgggcctatttctattccgtagaacctgtgcgggttgctggaggtggagaggaaatgaccagtgagcattctgggtgggcagggagtgtcgtcacaccatccatagctgacccactccctaaacagccccttggagctctcatgcttttactgtgtgctgagtccagcccaggcctcccccacagcctccagcccaggcctcccccatggcctccagcccaggcctcccccatagcctccagcccaggcctcccccacagcctccagctcaggtttcccccacagcctccagcccaggcctcccctacagcctccagcacaggtttcccccacagcctcaagcccaggccttccccatagcctccagcccaggccttccccacagcctccagcccaggcctcccctacagcctccagcccaggcctcccctacagcctccagcacaggtttcccccacagcctccagcccaggccttccccacagcctccagcccaggcctcccccacagcatcgaccacctgctcattgtgtccatgaacacttcaaaagcaacatgtcaaaaaggggaaaatacctcccctgtcaacctacatgcagttctcaattctgtcaccctggttgctggctgtagcctcagttcaggcacctgcactggaaaccagctagtcatctctgcccttggagcctctatagacctcctctgtgatcgccttttttcccagccttccttccctgacaaagctaacctggtccctccaggaatcctctggccttggctgggcccggctcccctctgcatctctgtgtgcccctttggcatacagtacatcatattctggactggctgtgagtgccttccaggcagggaatgccatagcaatcatggatccttggtcacctgcacacagtagggcgctgtcaatgtttggaaaacaaatgagtggctgagcagggtccctttgcaagcgatggctttagctatttgggtgactgtttttctttatattcttctgaatgtattcaaattcctcacagtaagtagctatcagatacttttagaattttttatggcaaaatgtttataaataaaatttagcattttaactctttttaagtgtagagttcagtggcatggcataaagtacacttacgttgttgtataatcatcaccaacattgtctctagaactttttccttttttttttttttttgagacagagtctcgctctgtcacccaggctggagtgcagtggcgtgatctctgctcactgcagcctcgacctcccgggctcaagagattctcctacctcatcctcctgagtagctggggtcacaggcatgcaccaccacaccaggctaactttttgtatttttagtagagatgaggtcttgttgagaggtgacaacatgctagcagccctcgctcactctcggctccgcctcggcgtccgctctggccgcgctcaaggagcccttcagccggcggctgcgctgtgagggcccctctctggggctggcgaggccggagccggctccctctgctcgcagggaagtgtgaagagagaggcgcgggcggaagcggcgctggcgggccacgggttccaggtgagcgcgggcttggcaagccccgcactaggcgccgccggccggcacttgctgggcttgatcggaggctgaatcccgtgcgtggaccgccgttccctcttcgcgggattgttggccacgacagccggtctccgtctctttctcgtttcccctcttttcctcttgattgtctgggacgagctccctctgggctgccttagtgcccaggctaggtgccacaaagtcccgctgccagtgccagtaagaggtgaagctggctgggcttctgagaggtggggacttggagaacttttctagctgtctcctgtctagctaaaggtttgtaaacgcaccaatcagcgctctgtgtctagctcattggatggggacttggagaacttttctgtctagctaaaggattgtaaacacaccaatcagcactctgtgtctagctaaaggtttgtaaatgcaccaatcagcactctgtcaagacggatcaatcagtgctctgtaaaatggaccagtcagctctttgtaaaatagaccaattagcaggatgtgggtggggccagataagggaataaaagcaggccccctagccagcaggggcaacccgctcgcctaccataccaggctgtggaagcttcgttcttttgctcttcgcaataaatcttactgctgctccctctttggttccatgctgctgtaacactcactgcgaaggtctgcagtatcatttctgaagtcagggagaccaccaacccaccaggaggaacgaacaactccacacgcgccgcctttatgaactgtaacactcaccgcaaacgtctgcagcttcactcctcaagtcagcgaaaccacgaacccaccataaggaagaaactccgaacacgtccaaacatccgaaggaacaaactccggacacaccatctttaagaactgtaacactcaccgcgaggttccacggcttcattcttgaagtcagcaagaccaagaacccaccaattctggacacattgtgatgttgtctaggctgctcctgaactcctgagctcaagcagtcctcctgccttggcctcccaaagtgctgggattacaggcatgagccactgcgttggccctctagaactttttctttatcccaaagtgaaattccataccttttaaacaatacctctccattctccttttcccccagtccctggtaagcaccattctgttaccggaaaggggtccccatgtagaccccaaaagagggttcttggaccttgtgcaaaaaagaatttggggcaagtctataaagtgaaagcaagtttattggtaaagtaaaggaataaagaatggctgcctgaggtcaagcacagtggactcacgcctgtaatcccagcactttgggaggccaaggtgggtggatcacttgaagccgggagttcaagacccgcctggccaacatggtgaaaccctgtctgtactaaaaatacaaaaattagctagatgtagcagcacacgcctgtaaaaccagatactcgggaggctgaggcaggagaatggcttgaactcgggaggtgaaggttgcagtgagccaagatcactccactgcatttcagcctgggtgacagagtgagactgtctcaaaaaaagaaaaaagaatggctaggtatttttatgggtttttttattatatgctaaataaggggtcgattatttatgagttttctaggaaaggggtgggcaattcccagaactgagggttcctctcctttttagaccatatagggtaacttcctgacgctgctatggcacctgtaaactgtcatggtgctggtgggcatgtcttttagcatgctaatgcattataattaacatgtaatgagcagtgagagtgaccagaggtcacttttgtggccatcttggttttggtgggttttggtcagcctctttaccacaccctcttttatcagcaaggtctttgtgacctgaatcttgtgccgacctcctatctcaccctgtgacttaatgcctaacctcctgggaatacagcccagtatgtcttggccttattttacccagcccctattcaagatggaatagctgtggttcaaatgcccctgacagttctacttcctgtctgtgtgaatttgactactctaagatatctcatataagtgggatcgtatagtatttgtcttttgtgactggcttacctcatttagtgtgtctccaaggttcatctgtggcgtggcatgtatcagaatgttctttgttaaagctgagtaatatagtccattaaaagtatatactacgttttgcttattcgttcatctgtggtaaacatttaagttgtttctaccttttggctattgtgaataatgctgctatgaacattggtgtgcaattacctattcgagttcctgctttcaattcttttgggaatatacttaaaagtgaaattgctggatcatatggtaaaaattacttttaaatttagaagcattttaaatactttcaaaacggtcattttgatttaaataaaaggtcaccttaagatggcaggtgacatagaaatgcaggatgaaatttcagccttttgttcttgcgacttgttagatgatccttggtgacatgaaatgatttgttttcaagtgtggttttgattttttttcttacagcatcaagcttctagctgtgcaagaactgcttgacagagaggccttggaaaaggtaaatattttactcttccttccacattcacaaaccaagaacggagggccacacataagaaaaattcaactccctgtcaccagagacagcccctactgaaaagacggtcagttattttgtattcctgacagcgaatcatgcagaattttaatctgagccccctaccttgctgacattgtgttcacacctacaaactcggctgtacctggctccctctgggttgtgtgcaggttgtgtgaaaggcagaggcccgtgctgcaaggggccatactctggaggaggctttctgtgctttcagccattaggagccagaggcctcacgcatgccggagtctgtgttggccacctcactgcatttctgcttgctgtgtgttattatctgggtgtagggatgatggaattgagacccagtaacttgcctaaggcaaatgaactaagtagaggagtgatgatttgaatcccaatagttccatttccaaaaccagtacttctctattcagtagtcaagttcatgcgtttttatctctttttaggctactactgaggattgagaaactgcctctctgcccccaaaccaatgtttcactgtgccctggaagagatccccagtgtgtctcggctttctatgttcaagtcaagcctgggattggggattttttgccagttgtgggttcaagttcggcatgcatggtggggtgggctccacaaaacaggctgggtgggcaccaaggaagccaggcccccctacttgcccatcaggggcctcccagctgataccaagctctcagaccctggggagttcaggactcttcctgcatgtgtagccgcaggtgataattagaatctgtgttgctaacatgaagcaacagcacccaaacgatattcatttgtttttggttagagagacaagcacttgaactatattcgtttatttttggaatttaaaatatttgagggggctaggtgaggtggctctgcctgtagtcccagcactttgggagactggagggttgcttgagcccaggagtttgagaccagcctgggcaacatagtgagacctcatctcttcagaaaatcaagaaattagccaggtgtggtggtgcacacctgcggtcccaattccgcaggaggctgaggcaggaggatcacgtgagcccaggaggctgaggctacagtgagccaagatcatgccactgcactccagcctggaagtcagagcaagagaccctgtctcacaaaataaaatatctgggttagtagtcagtctgctggttggcactaagacaaataaagtctttaaaatgaacaccaaccagtggtgtgagggaagaatgaggtctgagcactgctttggatttgatgtcccctcaacctcatttctatcttgggtaaaccaaggatagagctgctgcctgacctcagagaggcaaagtgagaagcaaatgagttaatgtagcaaaagggctttctaaatgccaaagcactctactcattattaattcttaattacttatattaattcttaatatgcattcagccatgaaaacatagtgggtcaggctataaaagacatcatcgggccaaatggcaacattggatgtggatagtaaatgagatgaaggtattgtattaacattaacatttcctgaagttgataattggcttgtgatcatgtaagagaatggccttgttcttaggcagcagttcccaacctttttggcaccagggaccagtttcctggaagaaaatttttccgcagacctgggttggggggatggtttcaggatgaaactgttccacctcagatcatcaggcattagattctcataaggagcgcacaatctggggacccctgttcttaggaattaacacaggagtatttaggaataaaggggcatggttataacttattctcaaatgattcaaggaaaagaaatagtgatgtatatatgtcagacagatccagagagagaaagatgagaataactcatcaagtaaatgaggcaaaatacaaacaattgatccttctgtgtaaaggggtatgtgagttccttgtatgttcttgaaacttttctagtatcccccctcaaaaaattgtcatcttagtattcattatggttattcattttatttctcaatttaaaaaaaccatcagatggctgggtgcggtggctcacacctataatcccagcactttgggaggccaaggcaggcagatcatgagatcaggagttcaagaccagcctggccagcatggtgaaaccccatctctactaaaaatacaaaaatttagctgggcatggtggtgcacctgtagtcccagctactcaggaggcggaagcaggagaattccttgaacctggcaagcggaggttgcagtgagctgagattgcaccattgcactccagcctgggcagcagagcgagactctgtctcaaaataaataaataaataaataaataaccatcagacaaagctagcatatgtggagcctagtgctggggtgtatcagtataataaaaatgcaggtgccaaaaataacagttatgactggacacagtggctcacgcctgtaatcccagcgctttgggaggctgaggcgggtggatcatttgaggtcaggagttcaagaccagcctggccaacatggtgaaacccggtctctgctaaaaatacaaaacttagccaggcggtagtggcatgtgcctgtaatcccagctactcaggaggctgaggcaggataatcgcttgagtctgggaggcagaggttgtggtgagccgagattgcgccattgcactccagtctgggcgagagagtaggaccctgtcccagaaaaaaacccaaaaataacagttatatcttttgagctgtgtgtacacctgatttagagaggtcccagagctaacccaatctgtgagtattaactactttcaaaacctaacagagaagtagggtcagggcttattgtggctggtggcggagccagttgtgctgccctgaggatgtgattttgatgctgaggctgcggcggagcagaccctaagcccaccttcctaactagtttatcttggattacttactttctcgtgccttagtttcccagtttataaaattgaaactattctaattcttaactcacagaggttgtaagatgactaattagatagttcacataaaggactgcaacactgtgcctggtactcagtgatctccaagagttagctgctgcccatgttctttcctattcctcttcccccaccctgattctctctccccgagtctgctgatgattttgtattgttccccccatctcaaaatgtgaccagtaagaagctttacaagatggtctgcatgtgtacaggggccagcagggagccaaattcgctgagtttcctcctccttccttctgttcattcattcattcattcccttatgctacaggaatttgttgagcttccagtgtgccaggcaagtggcaaacatttcttgaaaagttcagaagcaaacagtcatcatgagcttgatagccagttacattttgagtgacatatgatatattacctggcatagtgctattttgtgcatcaagattggtccagttgaggccaggcgtagtggcttacacctgtaatctcagcactttgggaggccaaggtgggtggatcacctgaggtcgggagttcgagaccagtctgaccaacatggcgaaactgtgtctctaataaaaatacaaaaaaaaaaaaaaaaaaagccaggtgtggtggcaggtgcctcccagctaatcaggaggctgaggcaggagaatctcttaaacccgggaggtggaggttgcagtgagccgagatcgcgccactgcactccagcctgggcaacagagtgaaactctgtctcaaaaaataaaggattggtccagttgatatgctggaataagatgagttcctaaagggcctcgtgacttacagattcccttccacctggactgattaaaaagccaacaagaaaagttatttgtcaaatatagaactgcgctactcgaagtgtggcccacagacctgcagcattagaagcctgttagaaacgtagaatctcagctccctgaattcagaccccctgaatcagagctacattctaaaaagcccccaggtgattatgtgctcgaaagttcaagaacgctgctgtagagtatcgtttattatcaccatcgctattattaactagtcagaaagaatctatgagttgtcaatttgacttttatggccaattaagcctggtttttttttttttggcaccaaaagagaagaagtaaacaccgtcattctatttgtgagaacccagtttttatttttagttcacctgcgtcttcctttgattaagaaaatagtcttaattcaataggtagagccagcaaaaaagggcttagttagacacacattctgcaaacctcaaacctcttttactgtcatgcagctgagcttcaaatgacaaccggcctttgagttttgtaatcactgaactcccaacaccctgctgtgatagaactggtcgcttctagccagacagtcccaacagtggggacctgcacaggcctcctcttttaagatggaagctattctaaaggggccatttccttcacaagtactggtggattaaatttgaacaataaaatatttaaattatgtaaaacctaatgtgagttcatgtcctttgtagggacatggatgaaattggaaatcatcattctcagtaaactatcgcaaggacaaaaaaccaaacaccgcatgttctcactcatagatgggaattgaacaatgagaacacatggacacaggaaggggaacatcacactctggggactgttgtggggtagggggaggggggagggatagcattagaagatatacctaatgctaaatgacgagttaatgggtgcagcacaccagcatggcacatgtatacatatgtaactaacctgcacattgtgcacatgtaccctaaaacttaaagtataataataattaaaaaaaaagaaaatagtcttaattcaataggtagagccagcaaaaaagggcttagttagacacacattctgcaaacctcaaacctcttttactgtcatgcagctgagcttcaaatgacaacctgcctttgagttttgtaatcactgaactcccaacaccctgctatgatagaactggtcgcttctagccagacagtcccaacagtggggacctgcacaggcctcctcttttaagatggaagctattctaaaggggccatttccttcacaagtactggtagattaaatttgaacaataaaagatttaaattatgtaaaacctaatataaaaagctaaaaagaagtagcagtcttttaaggtctcatagaaaataagtgctttttcttgctaatattaggccttgttattaggatcttagtattttaacttaaaatgaccagccatttgcctaaacattacttggttttaggtagacagccttcccatttttagacgtgccaaggttttcctgttttctgcagagcccagagccagctctgaggaggttcccaattggcagagccgagttctcctcccggtgtggcctctgctgagctgctgtgtctggcagaggatcttccctgaaggccccagcccctttcctagcctgtgaaactgctctctgtgattccttcccactcttcgatacctgggcttcatttttcagagttgatttttttttttttttttttttggagacggagtcttgccctgttgcccaggctggagtgcaatggtgtgatctcggctcactgcaacctccgcatcctgagttcgagcaattctcctgcctcagcctcctgagtagctgggattataggtgtctgccattatgcccggctaatgttttttttttgttgttttttttgagatggagtctcgctctgttgcccaagctagagtgcagtagtatgatctcggctcactgcaaccttcacctcccaggtgcaagcaattctcctgcctcagcctcctgagtagctgggattacaggtgcctgccaccatgcccagctaatttttttgtatttttattagagatgggatctcaccatgttggccaggctggtcttgatctccgggcctcaggtcatccacccaccttggtctcccaaagtgctgggattacagacatgagctaccgcgcctggccacagagttgattcttgatcacattgtgaagagggggacattttgcccttgtgtactcagttttctcgtattttctccacttccttgctccagtggtccttactgtgtttgggggctttcctgtttcacctgccctacttaccatcaaatcacgtgttctgggaagaggtgaatggtgaacacaagcccagtacatagatacacagagacccccaaggcataaatcagtagggttctagtttttgcctcttattctttgtcttcatttaggtgcagtagattgggtaggaggtgggggccccttgtgggatcaggcttctgagtttctcttctctcctaacgctacacagagccagttcccagactagtaaaagtgacttgtcacttatttttaaaatgttataaaccatacaattaacaatctaaattcttcaaccaatttcttctttcgaaaaatggttagaaccatgagcagatgatctaagatgtgtgagtgtcagtgcatgtgacattggtctgaaaaagtgttttggatttagatgtgctttttttgtcaaacatccattaggtcccaagagcaagaacttgctgtaagaaggatacatgtcatgcagttctctgttgtttttgctctgagagtgggacacttctgtttttctgaacttaagtcacagggacttgtttcccaggctttaaacacaggcccatctaaagcctttaaaagtggcatttcataaaaggaaataaaaatattggtacagcttgatttagaaagatcatttttcaatgaccctttcaaatggcttcctgcaaagccacaaacaatagtttggccggtcattccagctggaccgtggtaggaccagagggcggaccactggctgacccaacctgagaccagtgcctgcctgagaagctgcctgtgtgagctgggccctcaggagacacaggccacccacctggtggccttgccagtgctgccgctcccagatcatgactctgttataattacaagtccactgagttcatgctgtgagggcagaggtgggggttgaagccagccctgccatttgccagctgggggacataggaggccaggtactggctagcctctgtttctttttaacatggagcttcagaataatacctatcctattaggatattgttatgagaactaagtgagatgtgtgaaataaaagccgttatgtatatcgtaagcaccaaagtggcagtagctggtactatcccctctactgctaattagctgctgctgtggtcgtcatcatcatcatcactggcatctcgtccttacttctctctggagaagcccaacttgagatcgatctgttgccattaaaagatgtgaaagaagttgcatccccactgctccttttgccaaattgtctaggaaaagatgcctgtcagtcctccctgctgataggtgttttttttttagaatttcagctttggagcccaactcctattctagttttcctgaagatggagcagacctctaagatgtcttagagtgctttacatgtgtgacagagtatgtgcatttcatcagcaagcttgggactagaaaaattgaacttgggctgggcgcagtgtctcacgcctgtaatcccagcactttgggaggccaaggcgggtggatcgcctgaggtcaggagttcgagaccagcctggccgatatggtgaaaccccatctctaccaaaaatacaaaaattagccaggcgtggtggcacacacctgtaattccagctactcgggaggctgaggcagaattgcttgatcctgggaggcagaggttgcagtgagctgagatcgcaccattgcactacagcctgggtgacagagtgagactccatctcaaaaaaaaaaaaaaaaagaaaagaaaaaaattgaacttgacagattagtcagggagtttccaggcaaaccctagtggtgggcaacgttagaatgatagcttcctgggaattttcagaaggaaagaggatgataagccattttcacatagatgtgtgtgaataacctaaggatgcaaagtgcttgtgtctgtaattggtgagggtgttttctgaatatacacacatgtacatccataaacactacctctcttattacgtgcttttggagtgttattcactatgatttggacttgcaattaatttagtttctgcaacaattgagtgcttgctcagtgccaaaattatactgtttaccaacggggataaagttataaagatacatgtgattataaagatacatttacatttgaatggcatagaatcccagaacttcagaatcaagggagacttttaaaaccatctaatccaaccctgtcattttgcagacaggacattgaggccaagggagttgaagtgccctctgccccaggtccacagcaggtgtgttggtaatccaggacccatcacagcagactgggctccatttcccagctcctttaagtgcaaccagctgcccatcttctgtgatctcatttaatctgaacatcagccttagcaggcatactggacgatcctatctccgcatttcccaggagtgggagcaggtccataggatcagtcctggcccaggtgatggggaaccaatgcccagatcttctcatagtgtgacttgtagcaaaacagacttgcacagttggtgttagcctcctccagcaggagaggcagagaatgtgggatgggggatagaggacgcagaaggaggttctgggttccagatgtggacaatgtcaaaggagcacctaaaagtgaaggaacacacagggtgtgagggctgcctagagaccatccacctagcaggttatgggagccatgaggacacgtgagaggttggaggacgtggactggacacacctttcatttgggcttggtgtccaaatgaattacttcaagaatcttaacttataaaaatatatatactttaagatactttttttttttttgagacagagtctcactctgtcccccaggctggagtgcagtggtgcaatctcagctcattgcaacctccacctcctgagctcaagcgattttacccccctcagcctcccgactagctggaattacaggcttgcaccaccacacccagctaattttttctatttttagtagagagttggtttcactgcatttcccaggctggtctcaaactcctggcctcaagtaatctgcccacctcggcctcccaaagtgctgggattacaggcatgagccaccaccctcggccagatactcttttttttttttttttttccaaaaaaacactgtgttatttcaaaaatatcagaatgagattcttcagatcccttatttattttcccccacccccgccacacttagcccttcatgtagtcagagctgaatttgaataccaccttgagtgatcaatattcatatatttgtataaatttgcattgggttgagcaagatcagtggctaatcatgagtaaactcattgtaatcactttcctggctaagtttctatcagcaggaagatggcaacttctccttgaaagagctggtgagcagattgggggtgggtaccattgtggagcccagactccgctgtatggagtctaactcaggctcactgcagccaccacagctgccactagctccacttcacaaactcagtgctcagggtccacccaggacctcgctgccggaaagtgggcattttagttaattatgggctaggctctgtggttcattaaacacacacacacacacacacacacacacacacacacacacacattttctccttattctttgaaaatcatcacaagatatcaggtatattcaggggctctcactacctttttctttttatgaaaagcttttcttctaagtgagcaaaaaaacagagtccccaaacaggacttttaaactgtctttagttccctcagctatcaaagataagcaaattaaaccatgagggttcattttaaatttattgcattagtgaagttttaaagcatgatgtgtaatggtgaagttgtgttgaaatcagtgcccccggccactgctggggagggcaggtgacatggtgctggccttttccaagttcttgggcagagcatttcattagtgtttgtgatgtccccatcctttgacctgtgatccggttcctgggactgtatcttaaggaaatgatcgataaaaatggagaaataataaacacgctatggcatgctttataactatgaataagtgggaggcagttcagtgctatgtaggaagggagaggttaaaaaaatccgtggtaggtctacccaagggcctagtatatatccatcaaaaatgataagatcttttagcctcatagaattgtggtataatatttgctatgagggagaataagccgctgtacctactgcggttacaactctgtaaaacatgtatttattctttgaaccagtgtgtattgagtacctccttttgtcagggcttattcaaggctggaacatgcctacagctgtggacaagacctttccctttcgtatctcctgtagctcgcattgtaacttaagagaaaaaccttagcagtgacacaaatgtttatttaaatacagtagcaataagtgctttaaaaaaaacaggttgtcaagagggaggtcctcacctaatgttcttatgatatcaaaaaaatatttaaggccaggcacagtggctcacacctgtaatcccaacactttgggaggctgaggcaggaggatcacttgagcccaggagttggagaccagcctgggcaacatagtgaaaccctgtctctacaaaaaagtttttaaaagttagctgagcatggtagcatacatttgtagtccccgctactcaggaggctgaggtgggaggatcacttgagcctgggaggccaaggctgcagtgagccatgattgcaccactgcactccagtctgggtgacagagcaagaccctgcctcaaaagaaaaaaaaattaaaaatactaattacataactttttttccattttcagtttttaaaatcaatttaatattcctggactgaactttttaagatccacttggcagctgtgactggaggagcaggaggaagggactagagggatggaggtgcacaaggctagaagggtggatggtgcatggagatggagctgccctgagtggcccagaatcctgcacaggaggcccttctagatcagaacaacctatggccagtctgcaggtgaaatctggcccatagcttgtttttataaagttttattggaacacaaatgtacccattcaacttattgtctgtggctgcttttacactataacgacaggttaagttgttgtgacagagacagtatagcccataaagtccaaaatgtatcttatttggccttttatagagttagagtttgccagctctcgttctagatcagtggtgcttggctattgacccctttaaatatcagatgaaagcttcatgccctcatcccagaaagatgcgtatatgtacctctccacatatagaggtactcattgagtttccacattcaggaggtcccagcactgttgaagcttctccatggagccctcaggttcatacttcttgacactagtggaggtaggattcatttctttacccccaaaatgttgaaatagcttctctcatctaccaaatgagatgagcctagtgaggaaatgaatcaacccttaccagtggggtttagtgcccagtcaacaggggggccatttatgtggttagagtccagtcagattttagacaatatcatgtcccactggcacagaaacaacatcccatccattctgtttctttggcttatggtttgaccccatatgggttattctaaaggaattatctggtttatagacatctatgctcccattcttaatcctcttctttctagagccatttccttcctctataacttcagacaaatgtaggtcttcctaaacctccaattgtgctggcatttgccttcccgtcatttttgccactgtcctatttctcttctttcctctactggtaggtttctttctttctttctttctttctttctgagatggagtcttgcttttgttcccaagtctggagtgcaatggcacaatctcggctcaccacaacctccgcctcccgggttcaagcaattctcctgcctcagcctcccgagtagctgggattacaggcatgcaccatcttgcctgcctaattttgtatttttagtagagacggagtttctccatgttggtcaggctggtcttgaactcccaacctcaggtgatccacccgccttggcctcccagagtgctgggattacaggcatgagccactgtgcctggccccctactggtagttttcttaaaggtaaattctcatcctacacagccaaccttcatccctcctcgactctccttaactcttaggaacctggcccctgtcccagttcatctaacaaatcatagctcaccttccccaacttctaacctaacccaaagcattttagttttcaaaagttttttgctttctagtattaaaaagtattatgaaataattttatgtagaatttaaaattacatatatgcaatgattttttggtaatttctgtacagttatttgatttttataatgaaaacattgattttatgttgaaatatatattttaattttgcagccacttagacgcagtgatatgaattcaggagtgagaaaaggaaatcaatcctgctcggagcttagcttatctaggtcagctgagctgcttggggaacctgcatccactgccatcttttactcacgatggttgtttaattaatttttcttcatactctgaaagtttcgttacttcttagtcttcttattgattctggatttatagaaaaaaagaacagaagtcttataatatccatgcggattacagactcaggcagaggccaaggcagggcctacaccaagggcagaaaggtcatttcagtcagacctgaaggttttgggggcgcagttgccttttgcagttgtttgggtctaaatgtggacaggagagccaggtttattctggcggtgaagaatcatgccccgcccccctccatgttttgctatgacttctgttagcatcaactagagagagttttgctggcctgtcatggtggcttgtaaatgataggctggttttgtgaacttgtctagcccatggtttaagcatagtgtggccatgctaaaaacttttcctgtgagctttctatctccttgagatgccctcttttttctgggaaagcatctggagtttccagttctgaatgacaagagtagcttatatcagaataaccttccctcaaataacaatataagcgccagggaaaatgcacgtgtattcgaaggtaccaaagtgtggccaaaacagggagaaatggaggagcttcagccgctgagaggaggaactagctgttggtgagctctgcatcaatctggctttcccccttatggtacgccccagactgtgggggcaggcagagctcagacagaaagtggaggtctctggtgtgatagcatgagtgttctctcctttttttttttttttttttttttttttgatcagtctaggtaaaggtttctcagtttttgctaaacttctcaaagaacatttggttccattggtttttctgggtttttattttcctatcctctatttcattaatttctgctctcatctttatgtttctctccttctccttcctttaggtttagtttgatcttctttgcccagtgtcttaaggtggaagcttaggttattgatttgacatcttctttacatcagtaaagaagatctacccccatacatttcactctaaacactgctttagctagtatgttgtatcttaattttaattcatctcagagcatttttagttttcccttgtgatttctcccttgacccgttggttatttacaagtgtattatttaatttccacaaatttgtgaatttctcatgttattgatttctaatttcattccatatcactgtggtcagaaaacatattttgtttgatttcaatccttgtaaatgaattgaggcatgttagggacagcctaacataaggtctgtcccaaagaatgttccatgtgcacttcagaaaaatgtgtattctgcttttgttgggtagagtcttctgtgactatctggaggtctagttggtttatggtttatgttgtagttcaagtcttttatttccttgttgatcttctatctggttgttctgttattgaaagtgggtattgaactctccaattattattgaattgttttttacttgaattctctcagtttttgctttatgtatcttggggtcctgttattagctacacatatatttataatggcttggttttttaattgattgactcttttattatgataggatgttcctcttcacctctagtaacagatttttttaaagtctatttttcttatgttgtcaattcagctttcttacagttgctatttgcatgatatatctttttccatcctattacattcagttacgtatatctttgcatcttaaatgtgtctcctgtatacagcatatagttggaccttgtttttaatccacttttagtctctacctttttattggattgtttagtccattcacatttaatgctattattgctgtagttgaatttatgtctgccattttatctcttgttttctgtgtcttatgtctttttttgttcctctgttcctcattactttcttttgcattaagtgaatattttctaatatggcatttaaattattttaataatttttaactatactttcttgagttattttcttagtgattgagctaggatttaccatatgtatcttttttattatactttaagttctgaggtacgtgtgcagaacaagcaggtttgttacataggtatacatgtgccatggtggtttgtgtacccatcaacccatcatctacattaggtatttctcttaatgctatccttcccctagcccccgactccctgacaggccccagtatgtgatgttcccctccctgcgtccatgtgttctcattcttcaactcccacttacgagtgaaaacatgcagtgttttgttttctgttcctgtgttagttttctgagaatgatggtttccagcttcatccatgtccctgcaaaggacatgaactcatcctttttatggctgcatagtattccatggtatatatgtgccacgttttctttgtccagtctatcattgatgggcatttgggttggttccaagtctttgttattgtgaatagtgctgcaataaatatacgtgtgcatgtgtctttatagtagaatggtttataatcctttgggtatatacccagtaatggaattactgggtcaaatggtatttctggttctagatccttgaggaatcaccacataatgtcttctgtcttccacaatggtttaactagtttacgctcccatcaacagtgtaaaagcattgctatttctccacatcctctccagcatctgttgtttcctgactttttaatgatcgccattctaactggcgtgagatggtatctcattgtggttttgatttgcatttctctaatgaccagtgatgatgagctttttttcatatgttttttggccgcataaatgtcttcttttgagaagtgtcttttcatatcctgtgcccactttttgatggggttgtttgtttatttcttttaaatttgcttaagtttcttgtagattctggatattagccctttgtcagacggatagattgcaaaaatgttctcccattctgtaggttgcctgttcactctgatgatagtttcttttgctgtgcagaagctctttagtttaattagatcccgtttgtcaattttggcttttgttatcattgcttttggtgttttagacataaagtctttgcccatgcctatgtcctgaatggtattgcctaggttttcttctaggatttttatggttttaggtcttacacttaagtctttaatccatcttgagttaatttttgtataaagtgcaaggaagggatccagtttcagttttctgcatatggctagccagtttttccaacaccatttattaaatagggaaccctttctccattggttgtttttgtcaggtttgtcaaagatcaaatggttgtagatgtgtggctctttattactgcctcaatttcagaacttgttattgggctattcagggattcaacttcttcctggtttagtcttgggagagtgtatgtgtccaggaatttatccatttcttctacattttctggtttatttgcgtacaagtgtttatagtattctctgatggtagtttgtatttctgtgggatcagtggtgatatcccctttatcattttctattgtttctatttgattcttctctcttttcttcattagtctggctagtggtctatctattttgttaatcttttcaaaaaaccagctcctggattcattgattctttgaagggttttttgtgtctctatctccttcaattcttctcttatcttaattatttcttgtcttctgctagcttttgaatttgtttgctcatgcttctctagttcttttaaatgtgatgtgagggtgtcaattttagatctttcccgctttctccttgggcatttagtgctataaatttccctctaaacactgctttagctgtgtcccagagattctggtatgttttgtctgtgttctcattggcttcaaagaacttatttatttctgccttaatttcattatttacccactagttattcaggagcaggttgttcagttcccatgtagctgtgtggttttgtgtgagtttcttaatcctgagttctaatttgattgcactgtgtgctgagagactgttatgatttccattgttttgcatttgctgaggagtgttttacttccaattatgtggtcaattttagaataagtgcaatgtggtgctaagaagaatgtatattctattgatttggggtggagagttttgtagatgtccattaggtccacttggtccagagctgagttcaagtcctgaatatccttgttaattttctgtcttgttgatctgtctaatattgacagtgggatgttaaagtctcccagtattattgtgtgggattctaagtctctttataggtctctaagaacttgctttgtaaatctgggtgctcccgtattgggtgcatatatatttaggatagttagctcttcttgtcgcattgatccctttaccattatgtaatgcccttctttgtcttttttgatctttgttggtttaaagtctgttttatcagagactaggatttcaacctctgctttttttttgctttccatttgcttggtaaatattcctccatccctttattttgagcctatgtgtgtccttgcacatgagatgggtctcctgaatacagcacattgatgggtcttggctttttatccaatttgccagtctgtgtcttttaattgggacatttagcccatttacatttaaggttaatattgttatgtgtgaatttaatcctgtgattatgatgctagctggttattttgcctgttagttgatgcagtttcttcatgtcgatggtctttacaatttggtatatttttgcagtggctggtaatggtttttcctttccatatttagtgcttttttcatgtgctcttgtaaggcaggcctggtggtgataaaatctctcagcatttgcttgtctgtaaaggattttatttctccttcgcttatgaagctcaattttggctagatatgaaattctgagttgaaaattcttttctttaagaatgttgaatattggcccccactttcttatggcttgtagggtttctgcagagggatcagctgttagtctgatgggcctccctttgtgggtaacctgatctttccttctggctgcccttaacattttttccttcatttcagcattagtgaatctgatgattatgtgtctcggggtcgctcttctcaaggagtatctttgtggtattctctgtatttcctgaatttgaatgttggcctgtctttctaggttggggaagttctcctggataatatcctgaagagtgttttccaagttggtttccattctccccgttactttcaggtacaccaatcaaatgtaggtttggtcttttcacatagtcccatatttcttggaggctttgttcgttccttttcattcttttttctctaatcttgtcttcacgctttatttcattaagttggtctttgatctctgatatcctttattccacttgatcgatttggctattgatacttgtatatgcttcacgaagttctcatgctgtggttttcagctccatcaggtcatttatgttcttctttaaactggttattctacttagcaattcctctaaccttttttcaaggttcttagcttctttgcattgggttagaacatgctcctttagctcggaggagtttgttattacccaccttctgaagcctacttctgtcagttcgtcaaactcaatttctgtccagttttgttcccttcctggtgaagagttgtgatcctttggaagagaagaggcattatggttttttgaattttcagcctttttgcactggtttttcctcatctttgtggatttatctacctttggtctttgatggtggtgaccttcagatggggttttcgtgtggacatcttttttgttgatgttgatgctattcctttctgtttgttcgttttgcttgtaatgtcaggcccctctgctacaggtctgctggagtttgcgggaggtccactccggaccccgtttgcctaggtatcacgagtggaggctgcagaacagcaaagattgctgcctgttccttcctctggaagcttcttcccagaggggcacccaccagatgtcagccagagctctcctgtatgaggtgtctgtcaacccctgctgggaggtgtctcccagtcaggaggcacagggtcagggacccacttgaggaggcagtctgtcccttagcagagcttgagcgctgtgctgggagatccactgctctcttaagagctggcaggcaggaacacttaagtctgctgaagctgcacccacagccaccccttcccccaggtgctctgtcccagggagatgggagttttatctataagccactgactggggctgctgcctttcttccagagatgccctgccctgagaggaggaatctagagaggcagtctggctacagtggctttgcagagctgcagtgagctccgcccagttggaacttccaggcggctttgtttacattgtgaggggaaagcctactcaagcctcagtaatgacggacgcccctccccccaccagctccagcatcccaggtcgacttcagactgctgtgctggcagcgagaatttcaagccagtggatcttagcctgctgggttccgtggggttgggatccactgagctagaccccttggctgcctggcttcagccttatttccaggggagtgaacggtgaacggtgaacagttcggttttgctggcattccaggtgccactggggtatgaaaaaaaaaaaaaaaaaaactgcagctagctcagtgtctgcccaaacggccacccagttttgtgcttgaaacccagggcccggtgatgtaggcacctaagggaatctcctggtctgtgggttgtgaagactgtgggaaaagcatagtatctgggctgaagtgcagcgttccttacatcacagtccctcatggcttcccttggctacgggagggagttcccggaccccttgtgcttcccaggtgaggtgataccccatcctggttcagctcgccctccgtgggctgcacccactgtctaaccagtcccaatgagatgagccaggtacctcagttggaaatgcagaaatcactcactttctccattgatcttgctgggagctgcagactggagctgttcctatatggccatcttgccagcctccccatatatatcttaacttaccagatttgtacttagttcaaatttatactctatttcagacttgtgctcacttaattttagtaagatatagaaacgttactactgtatagctgtattctgtctttcccccttttgtgctattgtctatgcatctatacatgttacaccttgaactatacattgttataataattattcatatatataattttttttctttgagacagggtctcactctggttgcccaggctggagtgcagtggcccaatctcagctcactgcagcctcaatctcctgggctcaggtgattctcccacctcagcctcccaagtagctggaattacaggcacacaccaccatgcccggctattataattttttgtacttttagtagagacagggtttctctatgttgcccaggctggtctcaaactcctagaatcaagtgatcctcctgccttagcctccaagagtgctgggattacaggcatgagccaccatgccgggcctattatcttatatatttttatgtcttctaaagtagataagacagtagattagtgtgtatttacagagttagctatattaaccattttgtgtaccatttctagttttcatttgttcctgtgaatttcatttactatttggtatacttcctcactccaatacatctctaatcccatgtagctcctttgtgccattatttttacctatattagatttctatgtattataggcccagcaatacagtcatatacatattgttttatacagctgcttttaaaatcagttaagaaaatgaaggagaagaaatatgcacatatgtgtcttttataattactgatgctgttcattttgtcatagggattccacttggtctggggtcatttgcttttagcctaaaaatctgtcttttgggtttcttatcaggcaggtctgttagcaacaaattctctcagtttttgtatgggaatgtatttcatcttcatttttgaaagatagttttcctggatgtaagattggttgacagtttttctctttcagcgctttgaatataccacttcactgtctctgatctcttttgtttctgatgaaaattcagcagttaatctttctggcaatgagtgatttttgaaagctgggtatattgctgggggctgaaggccaccatatttactgagtgtggtatttcacttatgggcttctgaagagcaactcatacttctttagtgtcccagagctgcactggctttggtgacagtttcctttgtttgaggggatttctaaggcattatttgcataaagtccaacaaaaacatttcagatgcttttggcaaagataaaatgcaaaaaagaaagcctcgtgatagtctagaaagatcaaggaccttgtagtgagaaagacctgagtttgactctcaaataatagatcatgaaatcattttagtaaatttcccccagtctttgtttcagtgtagtcagccctccacatctgtagattcaaccaaccatggattgaaaatattcaaaaacgaaaatgttgcatctctactgaacttgtacagacttttttcttgtcattattgcccaagcaatacagtataacatctgtttacatagcattgacattgtattaggtattataagtaatcatatataggaagatgtgcatagattataaacaaatactgtaccattttatatcagggacttgagcatctgtggattttggtatttgagggaggtcctggaaccagtcctccatgaataccaaggaatgactgtgtatgtatagatgtatgtgtggatgtgtgcatggacgaatgggtgggtggatggacaaatgggtgggtggatggatgactgttggcaggcagaaaaatagaatataccaggttcccatataaagatttatttgttgctatgagtcatggtccagaatgtttgaaagttgctgttccagtccatttattgggttggaagagggcctgctctgggatttttccagtactggaagggcctctgcttgcccttgggtatatcctaagcacttttccctcctgccttgttagtctcttaactctgttttactttttagcagaaagaaaatgtgcccaactcactgctgttccttcaaaattgttgcacctagccaccacctcatacaaactctcacaacagccatgacgacaggagttacatgcaatttcctgtctttttcagtccaccctcaaataccacttatcagaaaatgctaacaatgacttggtgctgagagaactttcaattcacttttttagaggattctgagacttttcattaatgattcattcattcatttctggagaacatgactttgtattcagcaaagtttgggctagtcagtaattttaagtgcaatagaagggcaggcaggtgaaactgtttttgctacattgctaaacacatttatgctcgatattctcagcagataaaattatcctgattgaacaggccattaaagcttgctttgccagaaaataattcagtggagagttctgtcacattgctaacaatgcatttggaatgagtaattcctacagctgataaaatattttttattaaccttcaggaggcattgaaatgatgagtttaggcctgaacaagatttcaaatttttggaaatgcatccaaccttgtttcagaaattttgctccatctttgtagaaattcaaaagcgttcactgacattccttagaagcattatccaaaactcccttctagatcctggacttggtttccccccacccacaaactctgctgctgctctattctttcccgtgccctaaggcctgccctacctaactcttgtccatgaaatgcagactcatttttacatgcagaattagcctggcatagtggctcacatccataactccagcatcttgggagggtgaagtgcggaggattgcttgaccccaggagttcgagaccagccagggcaatgtagtgttagtaatggtgaatccataggatctacagcaacctcagtttttgcttctcagaggaaaaaaaaattgtctgagggtcatcagacagaatgagagaccaaggcaagttttagagcaagagtgaaagtttattaaaaacttttagagcaggaacaaaaggaagtaaagtacatttggaagagggccaagtgagtgacttgagagattcaagtgcatggtttgacctttgtcttgggatttcatatgttggcatgcattcagggggttgtgtctcgtctcccctgattcttctcttggagtggactgtcctcatgcccagtggtctgccagcatttgggaggggagcatgtacagtgtgtttagtgaagttgtacacatgctcacttgaggcatttcgcctgtaccagtcgagtgttcctggaggaaggtcatataccagttaaactctgccattgtgcctctaagtacacatgcttgagcccactcacccaactcctgagatcttatggggaagctgctgatcaccagcttcaggtgtttatctgttgggagactgccattccctgggggcagctgtaaacaaatattattttagagagacagttttacaaccgcctgaccatcacctgatggtcgcttgacagtcctggtgtatggggtaggggagggctctctcctgtcctgctcatgtctgactagctacatgctctaacaataggagactctgtctctacaagaaataaaatgataaaaaactttagctgttcatggtggtgcatgcctgtggtaccagctacttgggaggctgaggattgcttgagctcaggagtttcaaaaccagcctgggcaacatggtgaaactccatttatacaaaatatacaaaaattggccgggtgtggcgatgcacgtctgtagtcccagctactcgggaggctgaggcgtgagtattgcctgagcccagaaggttgaggctgcagtgggctgtgattgcaccactgcactctacccttggtggcagagaacaccctgtctcaagggaggggggggaaaaagcagagttaattaggtttgaagaagacagccaaagaaaacaaagcagcacctcacacaggaatgactctgaaattacctgctctcttggttcacctgttagtggcttcctccacaaggagacagtcaagaaatctatctaagaggctacatggaagcactgtggagtcacagagcagagcatcttcccaatgtgtatagctctggggatcttcaggggtcagaagtgtccaggattaaaacaagatccctagcatgtacaattcgaaggggtaaacctggaagagaagatgtcacgttctgggttttgcccaaatcccaacatttgcatcagctcctgggagagcatcagggcctttctcccatgattacaattcatgagaccacagttttgtattatagctcacctctagcaggtaagttctgtcttccttccctccatccacctgcctaaatctcttagtgggagaataaattgctatgtatcgattgttttgtttctcttgacccacacattcttgtccggcacttgctttgcaaggatacatttgcgagtaagaggggaggaagtaacaagtatttttatgcttcatttcaggatgtggcagggacatttttgatggtttcattgcttaatttatttggaaacagcattaaaccagcttttatttatgaaaaaattatatatgtttgtgggggagagacttttacatggataaagctcacaccagttaattagtattcatactatgactagaaaagtgaaatttctagaaaattttaaagcaagaagaaaaactaaggcatacagaattgcagtttggtctctctagtttcattttgtttcagttcctcatttatattgttaccagagtaatccttcagaaacacaagcttgatcctattactccttccttagagttgcttcagggggaagcccgcagtggggtcaggacgatagacatggatttgggtcctcacccagccacttgccctgtggataatcttgagtctgttacttaactacttcagccctgcattcgtcctctgttgagcaaggatgatgacacctcccacccgcacagagccatcacatggaccacatcgtggcgtgtgtgtaaagggcctgcagcattggcacagggtgagcattctaggaaatgtaagctgctgtggttccaagtcattaatatgaagtgtctcttcctggcctgcaggacactgtcatggcatccattatatggtccttgcctggtatttaatttgatttttgtaacctgtctctccttctctgtgtccagtttgcttttggcccacagtgcccagtatgttggagggagccagaaaagcctgtgaaactagcaccaaacagtttttcttcttttaagagcttgcggccaaaaatttaacaggaagggagctcaactaaaagatagcttgggtatttggctttccatttctcccattagcacgaaagaaaacagaaccagtgactctgaggacattctccaaagtgagaatgctatttcatgagctgccacctatagttcttgctgcccacactgaaaaaaaaaaacaaaaatctgtgtgatttgccttgaaataaaataggaaacatgcagcctttaaagactaggatttgacataatacagatcaaaataaaataagtcatgaatcagtaggactttcacccagggctttgaagcctttatttttatgattattgccaccgcagagcagagccggctgcataaacaccatttagaatagctgaaggctggcatcgcataagaaaaatggcaaccagagcgatttccctgagggtccatgagtcctaattctgtttaatgtgacaattcctgaacaactctggcttcttcacagaaatatgcctgggaagttctgggagcctggctgcctagagcccgcctgagagtgaactagtcttcagtgtttacagacagagtgacaattcctgaacaactctggcttcttcacagaaatgtgcctgggaagttctgggagcctggctgcctagagcccgcctgagagtgaactagtcttcagtgtttacagacagagaaaatatatccctggggtttaaaaaaataagtgggtgttcatgtaagagggtaggaatggggagctattgtaaactgccagcttggtcctactcataactcattttctttggatttgagtacctaaataattattaatcctttccccctttgtgttggctttctctctcttccatcttccttttcctcgtccctaccctttctgttgccatatctggcttttgatacctcaggggtaaacatgctcctactattcagttttcttgttgggtggtttcttgggttaggaaaccatctctctcctgtgtctgtctaacacattctttcagcctgtaaacttgaaaacatcaaagaggaagaaaattctagaaagggagagcagtggttgggtaaatcaacatggtttgtttgaggaaacaagttatcatcagcttgcaaacctggggcagatcccttttttgcttacaagctaatgttgtaacaggcatggctggcatttcctgccaaagttggggttcagcatttcagtaggaagtgccaagtgcaactccgccttctcagccttccttactggcatgcatctcaggcgatgtaaaccttagaatctatggaagggcatgtctggtgcaaatcatggcgtggccatccctgtgtttccgctctcacttggggtttgccacgctcccctttcctagactctcacaaaatagccacaaaatcctccagaaatcagtgctattttcagaactgcttctacttagaataattcatttcaataattactcacaaatttagtgcctaatttggaaagaagtatttatcttatttgccctaaaactgtctttttttgcacttcaaagagccagtattccaagaattactgggctgtgcattcctctcctaggtgctcagtaaccatatgtgaagagacgtttgaatcctcgcagtctagaggcagcctccccagggcagggcactgacctcctgtttctcccctgaccgagagctccacgacagcggtagcctagagcagcatcctttcctgcaaaatcctcagtgtttgttgaacgaaggtgtggttcctctgtgttaccctcaacatctagcccatcactcaagtcacttttaaaattattgatgtataattcacataacataaaattaatgatcaaccatcttaaagtaaacaattcagcggcatttaggagagtcatatcgtgtgcaaccatcacctctatctagttccaagatatttttatcatccaaaaaggaaacctcaaacctactaaacagtcactcccccttcccctcttgcccagcccctggcacctaccaatctggattctgtccaaagtaatatttacctactctggatgtcttgtgcaaatggagtcatacaatatgtagccttttgtgtctggcttttttcgcttagtgtaatgtgttcaaggttcatccatgtatcagtacttcattgctttttcacggctgagtaatactttcttgcatgaatataccacattgtgtttctccattcatctgctggtggacatttgggtcatttccatcttcgagctactgggagtagtgctcctgtgaacattcatgtacaagtatttgtctgaataccattctcacttctttggtgccaagcacattatctcctaattatctctggagtctgcccactgccatcctcccagtcaagctactcacctctgttactgcagtactcagctggcatttttgtggccaccctggcccttctgcaacttgtactctataccatagccccatggacttttcaaaattcagatcccctcttcacaccctgcagtgatcttaggattgctcaagggataagaaacacatttctttcagggtatgggggcccctgcatggccaggcctctgcaagatcatctccccaccctgccccctccctccacatctgtgccacagccacactggcctctctgtcctgcaaactctccatgctctgtcccaccacaggccctttgcacatgctgtctgtgctgcctagcatgctctcccctcctcttggcctaattaactcctcttatccttgagttctgagctcaagcatcacctctttggagaagctttccccaactaagtgaacaccaacaccaagaccatcctggatgcacacaagctcctggaaccactcctctgcagcccaggccccagctgcagttttacatgcaggtgattacttgtaagactgtaagctcaggttgggcaaaggaccatgtctattttactccccattatagctccagaattgtcatggactagctgtttgtatcccctgccacccaccaacttgttatgttcaagtcctaatccccagtatgatggtgtttggaggtagagtccttgggaggtaattgggtcatgaggggtacagccctcatcaatgagattagtacccttatgagaagagacatgagatagattatctattctctgccatgcgaggacacaggaagaaggtgaccatctgcagactgggaagtgagcccccaccaggaatggaatcgctggaaccttggtcttggacctccagcttccagaactgtgagaagtaaatatttgttttttgagccacccagtctgtggtattccttgaagcagccctgaactgactaagataagaacctagcccaggatggcccccgtttggtgcttgttaagtgttttgttgttgttgtttttgagacggagccttgctctgtcgcccaggctggagtgcagtggtgtgatctcggctcactgcaacctctgcctcgcaggttcaggtgattctcttgcctcagcctcccgagtagctgggattataggcatccaccaccgtgcctgtaatcccaggctaatttttgtatttttagtggagacggggtttcaccatcttgtccaggctggtctcgaactcctgacctcatgatccacccacttcggcctcccaaagtgctgggattacaggcatgagccaccttacccagctgcttgctaaatttttgtcgaatgatcagatgagtccattctcctcaccagagaatgttaccaaccacagcttcccgtccctctatccatgccagcagtgctttattttgggggactgtacctcccagcatgcaatgctggctcctggccccaaccgtgattcttgcctccttcctccactggtgtatttcagaaattgtgctgccaggtgtggaatgtcgaagggggatctgtctctctgtagtctaggcctgagggagcagcccagtgtgtctaacaaccaggagagcacatacagagacttgctgggtgccaggcctgtgctacctgctttagaaatagcaaatacgtgaggcgggaatgattctttgccccttgttacagatggtgaaacagaggcacagaatacatgagtcatttgcccaaagtcaaaactcttggtaagtggtagatccaaagtttgaatccaggcagcctttctctagagtctgcgttcttaaccttactattaaataatgagtggacttaagcattcaggacatggaagaattcttctcatagaagagaaatctgagtgatggcagtagtgtttccttctggagtctgcatgggtttgtttaaagcactggagtgggcagtagacattcccgccaagttctggcttggcaatcccatggccattttaaacacacagataaccaaactactcagcttatttaggacttcacgcgctcctcaaggtcctaacaaatacaggttgatgtcaagacaaattctctaaagaaccactttattataaataaagctagagggaaaaaattaaggtgaggactatttgtcttcagatgaaaaaaactaagctatttatgaagactcttgtcttgtgtcagtcagcgatttaaaaaggaaagagtcaagccaggtgtggtggttcacaactggtcccagctacttaggaggctgaggcgggaggattgcttgagctgaggagttggagtctagcctgggcaacatagcaagaccctgtctctgaaaaactaaagagtcatgtcctttctgatcatatgttttgaggggttaatgtctttggtcattcatactccaggcccctgtgctgccatctgtttatcacaggcaggtatattaaaacaaagcaggctgggtgcggtggctcacgcccggaatcccagtacttcaggaggcccatgcggaaggatcgcctgaacccaggagtttaagagcagcctgggcaacatagagagatcccatctctattctaatttaaaattttaaaaaataaagcaaaacccagcaacaaaaccttctgatttacttttggaaacaaagatattgccatttgaaattcttaggattcttttctaaacatatagataaaaatcatttcgaacatgagagggcatagtgggtgaagttttattgctaccttgctaggtgattttaggatgtttcatagtgattagaaatgaacctcaaaaaggcagaaagttcctccagccaatgaaagcttcgccaccaaggagatggcacactgaacaacagcaggttagatggcccaggaaggacttgattttagaagagcttatgataacatggcacagtataagtgggaaaagcagaatgtgtgtgtgcatatgtgtgtgtatgtgtgtgtatacagacatataagatatattgataaaatgcacaggaaacagcctagaaggaattccaccaaaaatattagcagtagtggtctttgcacagtggtattatacttaatttttttctgactctctattttataaattatcctgcacttgtatttatttatagcaggacataagcctttatttatttattttttattatactttaagttctgggatacatgtgcagaacgtgcaggtttgttacataggtatacacgtgccatggtggtttgctgaacccatcaatccatcatctacattaggtatatctcctaatgctatccctccctagcccccaacccccaacaggccccagtgtgtgatgttccctgccctgtgtccatgtgttctcattgttcaactcctacttatgagtgagaacatgtggcatttggttttctgttcctgtgttagtttgctgagaatgatagtttccagcttcatccatgtccctgcaaaggacatgaactcatccttttttatgactgcatggtattccatggtgtatatgtgccacattttcttcatccagtatcattgatgggcatttgggttggttccaagtctttgttactgtgaatagtgctgcagtaaacatacatgtgcatgtgtctttataacagaatgatttataatcctttgggtatatacccagtaataagattgctgggtcaaatggtatttctagttctagatccttgaggaatcgccacactgtcttccacaatggttgaactaatttacactcccaccaagtgtaaaagcgttcctatttctccacatcctctccagcaagctattgtttcctttttatttattattattattattttttttgagttggagtcttgctctgtcacccaggctggagtgcagtggcgcaatctcagctcactgcaacctctgcttcccaggttcaagccattcccctgcctcagcctcccgagtagctgggattacaggcgcccgccaccacgcccggctaattttttgtatttttagtagagacagggttttaccatgttggccaggctggtctagaactcctaacctcatgatctgcccgccttgctgggattacaggcatgagccaccacgcctggcctatttcctgactttttaatgatcgccgttctaactggcatgagatggtatctcattgtggttttgatttgcatttctctaatgaccagtgatgatgagcttttgttcatatgtttgttggccgcataaatatcttcttttgagaagtgtctgttcatatcctgtgcccactttttgatggggttgtttggttttttcttttaaatttgtttaagttccttgtagattttggatattagccctttgtcagactgatagattgcaaaaatattctcccattctgtaggttgcctgttcactctgatgatagtttcttttgctgtgcagaagctctttagtttaattagatcccatttgtcaattttggcttttgttgccattgtttttggtgttttagtcatgaagtctttgcccatgcctatgtcctgaatggtattgcctaggttttcttctagggtttttatggttttaggttttacatttaagtctttaatccatctggagttaatttttgtataagctgtaaggaacataagcctcctattctattctattctattctattctattctattctattctattctattctattctattctattctattctattctattcttgatttctattcgagacagagtctcactctgtcacccaggctggagtgcaatggcacaatctcggcccactgcagtcttcacctcccagattcaagtgattctcctgcctcagcctcccacgtagctgggattacagatgcctgccacaacgccccgctaattttttgtgtttttagtagagacagggtttcaccatgttggccaggctggttttgaactcctgacctcaagtgatccacctgcctcagcctcccgaagtgctaggattacaggcatgaaccaccaccccctgccattaatttaaagataaaaaaaaaagccgatgaaattactatggaagtcttaattcccatctaggattaagagtcttagcatccaaagacctttggagaagtaaagaacctttggaacattcctaaagggcagagatgagtgatgaagatgacgctgatgacaatggccacagtgtgaaagtgcagagtccctaaggagtgtgtttgcaccccacacagctcctccctcctcctaacttcacttcagtctccacaaacttgccactgcatcttgctctcagtttcataatagcccttgcaaggtttttctggttttttgttgttgttgttttttttttttttgtgctcccttcgcttatttgtaaccatcttgctcaggaaccatgtggttggtatctttggggcacatggagaggctaacagaaccagcagtcgctcgtggtgggagagcacgtgggtgtcacttaccttggttctgtaaaagcagctaataattagctggtggcgggggctgaggaaatgtctccttgtttgctttctaccttcctctgcatgataagaattttaaacaaggatgcaccatcatgcagaatgccttcctggcccccatggaagaagaatggggaagagccacccttcaagtggcacactgtgacacaggagcaggaagcccatggcttctcttgacaaggaagggtgggacctgagcatttagaacagggcttccttacaaagctctgaatgctaggcatgtggcacggagtgggcatggcccaccagccccggcccctcctgggaggaaagttgaccgatgtactgacctctgtgtgaaatctgggtcatcagggcctatgtgacccgaggcatcagtgacgaaattgacctcagcagggtggtgactgtgcagctccagggaactcacaagttggaatgcatttggtgcatgcttacacacacacacacacacacacacacacacactcacgggtcgattggtttctgtttactgagtgtcagtaagtgacccggctatgttacctttctgagccctggtttcgtcgtgtgtcgaatgggactgttattcccaacctcccagggttgttatgaggactgaatatgagctgtgattagtgcctgccatatccttggtacttagtaaatgttggtttcctttttctccccattcctccccctggctttttttaaaaaacaggactcaggagccaacctcatcatagcttcttggccacctgtgtcttcttaccattgttggatttacccaaattaacctcttgggattactacctaagtaaataagagcttaaaagtgagctcttattccaggcagtttaggaaggggtctttaggtggagctcacatggcaattatcacagagaaggagggagaaaggggttttaatgtttatgagactcatatttcctctctcagttgtatgctagcccctccctcctgccttttcctcccagagttctagaatcatgcacttttagaactagaggtgccctggtctggagtcatttccccccatccctttgcttaacagatggggagactgaggcgcaaagatgttcagtgatgtgtgcagggtcccagagctcctctgtgctcctctccttccacccataaatgtggccctctgaggaaacttccaaagccacgaggaagcaagcccagctcattctttcattactggaaaaggataattgctcactgagcctttaagtgacccagggaatggcctgcctcttctccctccatgagctcctgggccagtaggaatggatcctagaggcagtgctgtggcagtgttgtgtgagggttcaaagtggccctggagcccccaagacacactgctccctgccctaccttgggcctgccccctctgggatgcatacctgcgtttgcgctggagcaaaggtagctacaccttgtcttggctctgcaggaacccacctcctctctttgaagggcatgagccaatgagaaatctctctcatacagactgagggagaaagaaggttgaaatactccttgctgttgctttatgaccatgttacatccagtgtgtgagctcctgcctcagccctaaggagagccagggcatgtacaagccactaagaaccatgaagtcccttggcactcagtagacctcagcagagagtgtatttctgccctgtaggccatgtggcctttaaaaatattaatatcttgatattttaaatatcctagaaaaactttgtagtaggcttctttgttatatttagcaggccaaacatggttaatatttagtttatacttggacataatttggcttttgtgttctcacttttctcatagagtaaattgactttcatttttattttaagttctggggtacacgtgcaggatgtgcaggtttattacataggtaaatgtgtgccgtggtgatttgctgcacctatcaacccatcacctaggtattaagcccagcatatattagctatttttcctaatgctgtccctccattgacattttgtaatgaccccaggcattcctcagttgcagcccccgtgtgctcacccacagatatcctcaggttcagtgccttctaatatcggttgttaacatccccatacgcaagctcctggcacacggacacccttgcttaccgttcacatttctaaaaatgttgcctctgtcatttgccctgtgtcctattgtattctaatgaaagttcagtctcctgaccttgcacggcctaagacaagggcttctttcttttatggtaaggatttatctttttaaggagaactcacctgtgcatcttcatccaccaaaatagattgcgttttcagtgctactgctgagaacacacaggaaagtgttaccatttgcaaaactcattgtcaaagggaagtcacgtccagagtcaggaaagcaagtgaaacacccacctcggtgtagcagcttcatctggaaatttgacctagagggttcaaaatgaaaacatgccctccccacccatccaggaagcaggatgaggatggccattcagagtttactttaaaatgcctaccagtactattgatattctgccaccagctgtgtggtcaccattagcaacacatctttataaattgctcacagagtcccaggttgcattttaatttcactggaagggaaagactaaaggatctctgaacttagtggtagctggacagaccactgagtggagttggaacacctttatttttattattattatttttatttatttatttttgagacagaatatcactctgtcacccaggatggagtgtagtggcgcgatctcggctcactgcaacctccacctcccaggttcaagcgagtctcctgcctcagcttcctgagtagctgggattacaggcacgcgccaccacgcctggtgtgtattttgtattttgtattttgtatttttagtagagacagagtttcaccatgttggtcaggctgggctcaaactcctgacctcgtgatccacccgcttcgcccttccaaagtattgggattacaggtgtgagccactgcgcccgaaccacctttattatttttatttccgagtcagcaccagatgaattatggaatattcttttcagaaagagggaggagccaaagtaggagaaaaaaagtccaaaggtccacaagcaacatatcggttggtttcaagccttagaaccccttgtcactgcagagtcacctgatccacggccgacccaagatacaacacagctcaagggtgtagccaaagtagtctttcttttaggacttggcatttctaaatgccagcaccttgtacatctcgtagattggagtttaaatatctgactttcagaggcatttgaaccagagtgactccatcttgaataggggctgggtaacctactgaggctgagacctactgagctgcatacccaggtggttagacattctaagtcacaggatgaggtaggaggtcagcacaagatacaggtcataaagaccttgctgataaaacaggtttcagtaaagaagccggccaaaacccaccaaaaccaagatggcaatgaaagtgccatctctggtcgtcttcactgctctttttacactaattataatgcattagcatgctaaaagacccaattttacccaatttggtctgatgctggagaaacaaatcgagctcattggtagctcttataactgattctgggaaactgggatccctaggagagattccactgagtcattcattcaacaaatgcccattgcgtacctactgtgtgccatagtgtgacgggctcagtatattgcctcattcattacctcacaaggttatctgttaacagccacaagtcagaggcttttgacgtacagggtcccgggagagccaaaatagtatttgtttgtttggaataataaaagctgtcttcccaggccacaggaattaaaactaggagtgctaaatcagcaattgtctagccttgcctgagcttctcaaactgtactttagaattgcttgggggaacttgttagaagtacaaaccttggccagaacctcaaagaaccagactcaggcaatccaggatggggtccaccaatccaaggttttaaaaacaagaaccagatggggataggtgatgagttagccactggggattcagaaacccgagagggtggggtggcagtagttgggctttgcaggccagactggtctgggacactttgtgatgaacacaaaccttccctcttccattttgacctttctgccctggtgggctgcttttacgtaagagtattatttcttccttttgtaggcaaagcaaaaagtgtgagaaccagctgctctaaataaaacaattgaaggtggagttcagattgagagctctcagtggctgcttttgttttcctttgaaagttttgggagaaaggagccaaagattcagtagagggggccagccccaacccttttgaatctgccctgcctcccctgttccacctgtcgaggccaggaagtagagcagcaggaaccagccctgggttcagaccctcccgctaactgtgtaaccttgaatttgaactcgagcttgggcttaacctttctgtgcagcactgtactcatgaatcactggtagcagttacctcctgtgggctgtgccaggaataataaagacggtgcgtgcaatggcatctgccttggtacaggtcaacaggaaggctctaaaccaggattctccagcttgagaagctcgtagctcaactggggtcttgagaaaatgatgccgattctcgtgcagcaggtctagggtgggcctgtgagtttgcatttctggcaggctcccaagtgaggttgatgttgctggtccatggaccacactttgagtagcaagcgtctgaaaggtgctcacctccttaggttttctgtgaatagttagtgcagatagctaagttaacaattcttttttcagtcctaaaaatagaagaaaatacttactccttccttaactctggtcatgaaaattaggacatagaatgcttgtagccataaacacttatctccctcgtcgctcaagttattaactatccctaataacgtaaatactgaagaagaaggcagagcgaggggtcggtgatctgctctgtgggctgagagaggttattaaggacagggcttcaagcatacagaataaagatggcccttaagggtcagggattctgcttccttagggctcctagagcttacctgtgagtgaaaagtttttaaatattaatagaaagcaaagaaaaatgagaatgtcttttcttcatccatgaaatcaacttgaacctatcagagtcatctagaggggctgttaaaatgcagacttctaggccccgcccctgagagtctttagttaagtaggtcaggggtagagcctgagaatttgcattttgaacacattcccaggtgacactggtgctcacactgtgaccagctcaaaagaccaccagccacgagcatgggaatcagtgctgtcagcctgggccacctcttcagacttccgacccctcccatcaaaatggtgttgccagggaggggtttttctaagccagggtggggtttgggtatgaatgggagatacaattgtcctcaggtatctgaaggtcctcctgggggttaggagagattagatttctggaaaaggagaacaatcctggtggcaccgctgcagacagggagtcacagcaccttggtgtgttccttctccacccccagggctgggcctctctgatctacctggttggctgatcccttggtgggggggcggtggggggggcgcttcttaaaaatagagctttccagggtgcatcccaggagattctgatgagcaaccaggtttgggaccccctgcgaggaaaacagtgaagcaccagctgggcactggagagctgctctgtttttaatgattcttggatgcagcactaatgatcactcagcaagcgaatgattccctggcaggaaatgggaccctttgtgaagtacatttccttgcaggatccctaaagttacagtcgataaattctggctgcatcttccaaagtgttttatttcccatctgaggatggcttccagccaggagcatctggccagggggacttatccagggtaaaaccccaccctctccgccttccccactccctcgcccctgtcagcagtgactctctccacagccactctgctctgggctgtgttgaaagtagaacctataaaagtcatggttgagcaaattccagagagaatgcttcccagacaaactcagcagcagagaacatatctgtatgcaaagagtcaggttacaatggaggcaactacttggataatagcctaaggagaaattcccaccaccccgactccccgcatccccgacccccttccctgcccctgctttgtttgtcatgctgtcatgcacagatttgaagactgcagtcttgccttgagttttctgcttcaccagcagatgtttcagagcatcactgggtgctgtgctctgtgccaggtaggggtttataaaggaggctcaggtacagtccctgccctgtggagtccactgctggagaaagatagatgcttacatgactaactgtaaaagcagcgtcactcctagaatagcccatttctaaagtagacctcccagcactctccctccccttgcctggtttcatcttccccacagcgcttgtccctctagaaatgactagctcagtactcagtaatgaagtactggtgcttcatcttccctcttacaaataaagcaatgtgaggggaaagaccagacctttagaccctggcctctcccaaccattgtatgtgggctgcccagggggcatgagagtggctttctgcagcagaggcgttgggaggctctgctgagagggtggctgctcacacaccgccaggatctggggcagaggctgagggaggacctgggcggccacagcagctctcaaacccaagcgtgcatcagaatcttccagtgggtttgttcaggcacagattgctgggcccacttcagagctgctgatccagtaggtctaggatttctagcacgttctcaggtgattctgtggctactggtccctagaccacactttgaggaccgcagagaggtgcatcagcatggccatgacagtgaacttagtgaatagctgcagggtgggtccagtgacggacttcttagaagctatgccagtgacccccgtgagagaagacaggactctgaaacaggctccagcagtggggctggagaacagaaaggaagcacccaagacacatgcgacagtggaatcagtgcgctggtgggaggcgaggaaggagttcgagcagcgggaaggatggaagtgctttggaccaagatgggcactgggtggaggaaggaataatgtgttccctttgggacctgctgctgtgaggggctaaggagacctccaggtggagatgctaaggaggcagtgggaaatgcttttaaaactcaggagagcagctggcgacgggtacagatgctggggtcttctggataggggtgtaagctgcctcagtggggctgaatgagagtccttaagcggagagagtggtgatgtgcttggaagccaagaggctctcactcgtaggggtggttagagaaataaacaagtggagtgctccaaggcttgtgaaggacaagggggcatgaccccaagagaaggggttgtgtttgaggcatgagttagaggagctggtctccatattttgaagtggatagttgttccactcctcatcctactgtgtgcaattttattttgcctcagtgacagtcactttacagccatattggtgcaacatgcattagcaaaagaagtgcatgccgcgtgcacgtgtgtgggtgcagcagcagctctccgcagcaagaggtaaacaagacaagcactacggtggttcaagttgaagctggaggtcattttttgcccctgtaagctgagccctgaagaagaaagtcaccatgtatccatcttgttacctttttggatttgacgctgatccagatcctcctgggaccttcaatccgctgcttttacaaggatgaaaaggattctgatgactttttttgaactgtttgggcaggaatgctacagagagaatcaatttctgtgaactgagagtccccaggtgataatttggtgtttcacacacaggcagttttctttttaatgtgtggtgcttgtttagtcatctggctcttgcaaaccctagtgtttgaaaaacagggatgtagttcagcagtgtctgaataaggctgatgactcagaatcatgcagtgcctggcttctcaggccgccgccagccgggactgctttaggcgcgaacccacgcttctgacctgtgctctgtctttgcagttctgcacggagctaaaccagccgaccctgcccaacatccgcaagtggaaggggccccggggatgctggaaggctgttgttgctgagaagccctcgaatcagctccagaaggtaccctcgtctgcaaagcctggcctttcccttcatttaatttatacatacttttcccctaatcaagggcatttaaaaatttcctttgccaatatccccggttcaattttgtatttctgcccaatttttaaatccttgccattcatttccaaatgccctggttttcggttcacgtttagattgggaatggactcctgccaagaaggaaatgagagcttagggtgttgggaggagaggaggggagaaaggcaacaaatgggtatttctgtcctttgtccttctaatcccttcgccacagttctgtcttctgccaagtttgtgcagagctcattactcgttgactgaaaatttcagattcaccttagttcacacatgaagtatttgcttctagtggtagaaattatgcacataatttcaacatagaaatgttctattgaaatgttcagcagattttggttttgaattttctttcatcagtatcacccatatgagcaggtaagggtaaatctctgtaaatacacgttttccctcatattattattcaaggccagatttattcaccttgcaatgcttaacatcaatggagttttagatttttaaacagactcctgataataaccaggagttgaaaatgtattattacataattttcctataaatgcagatttttaaatccctagtatacctaacatgcttacaaacacatgtgatttatacttaatatgattatgtttataatgtaggctcttaaatcataaatgtatactggattaaaagtggccattttttgacagtaagcccctactctctttttagctactacttaaagaggtacatgtaaatcttctgtctctgggttttatgtttgggggtgtaaatggctcctgcagctgacagtgagtcagcacacattcagagaaggctggagataaagctgaatttgaatgcatctagttcagggttctcccttccagtccacgtggaaataataagaataataccaccttccttttttgatcgcactttacatgtatgtaggtgtctgagcttcacaagccttttatagtccattcagcactgcattcattcaacaaatcattaatgaaaggtggctatgtaccaggcatattgtttcatgccaggtacacactggtgagaaaaactccatgcctgcatgttttcactctttgcaagacacagtggggatcccggctggagcctgacctggcccctcccgcagggagtgcacagcctgttggagagcaagacaggtaaccccattccaggtcagggtgtcaaggccattggaaaacaacatgaggttgcagggagacccgagttccatccaccaaaacctctcggcctcaattccttcatctgtaaaatgggagcgatagccctttcttagctcacctatagggtggctataggattttaaaagatactatgcattggaatgcatcatgaacgtagcgcaggccagggccaggcggaacgggcatgaggtggcaggctggccgcctgcagtggactgagagagctcatgcctggctctggctgctgctgggtccatgtctacccagttgttaccctgcagtattgtgggcccaatgtggccaaacctcccagtttcattttaatgggaaatttcctgaattttaaagatgaacagataatccaaaaaaatttaaacactatgtgaatcaaacagaatatatctgcaggttgaaaatgttcaatctctgtccctagacaaacataagaaagtgggccatttctccgatgcctgaaattctgccccaggcatcttctccccagctccctagggcttacacgatagccagaggggtggtttccagctgtgaaggtgaagacctagtaagatgaaatgatttgcccacaagccacccttttgcaatgtgaggtgctcggacctgagcccagttcactctctctgtctggaaaccctgttcctccggctgctgttctggaggagaggggagcgcctaggtcaggggcattgggaaaggctcccaggaggggcaagaaaccagcggtggaaggagcagcacgcagggaagtgggggtggggaaaacagtgctgagcaggtgagggaggcagaggaaggagtaggccccaccgcagaggcttcccctccagggccatcggggagcccctgaaggcttttgggcggaagatgactcgagtgatgctttaggtaagttactctggcaccatgacttgggaaatggcagatggagagataatcctccaaagccagcagggcagtcatacctccctccaaaccagaggaagctgaggtttagaaaaactgagtgggtcgcccagggtcccgcggctaagtgactcaggtgggactgaggcccaggtcttctcgttctcaaaccagcacactctccagggggtgggcaaggagataatttcaaatatagaagtgcacagcatacaatacattcattccctccctccctcctcctaaaaacacgcatgttcagacaaggcatgtggcttagaccagagctgaccttggggactttgtggtggctgctcaggagggtggttgtgcagagtcacttcccctccttttgcaatggggaagagtggtgatgagcactgctggcctctcaaatgacatgcagatggctcccaggcagcgggtgctgaggaagcattctcatggacagcagaggctgtggtggggtagaaaggagaagtgtgtcttcttccacaagcccccagtggcggcggcagcagcgcaaagcaggcatattcagagcagcagggtttaacactaggcactaggactctgccccaccgccagccctggcacctctgacctaagcttcacacctctgccatggccccatccacctgcggagggccctcgagcagccccaagccattaggtcaactgcgacctccactcacccagaaaacactgagtgggctcttactaggtgccaggcaccatttttgtaagctgcagctaatcagtaagcaaaacccatcccttggagttatatgttttagtctcagcattgtgatcagctgtgggatttcaggaaagtcacttaacctctttgagcagcagtgtcctcatctgggaaatggaagcatgaattgctacctcatgggatgtgatgattctgaagatatctctgtgcctagccggggcttcacccacctccccccaaagacagaagagcccaggccaccctgtctgtatggaaagctctgaaattggcaatatgtgaaattatttgggctggggaagggcaagggagagtggctgtggctttcgtggtgtgcttttggtttagaaacagcttgagccagagtagggcctactgcctctcggtctctctggcctctctgcctcctttccccaggtggcgctagggctctggcaccaagactctgtctccctctccgctgcagggagctgggtatgcaggattcctatgggacgcggctgccggcatggagctgagagacgcgggttcacaggagagctcgccaagcaacgggcacgggaagctggcgggccccagcccatacctcgggaggttcaaggtacccgctccacgccgtctgtgacgtggaatctgcttctttctaaaaaggaaagaaaagggctcattttgtaatagcatgagtaagagaagtctcgtctttttgccttgatttcagcctctcatgattggagatttttgtctctcctggggcttccttggcaggtgaacttgtccagggcaggaatgaaagggattttgagacagccccagtaactctggcatctgagcaggagaggggggaaggagggagatttggtatagctcctaaacctgaccctcattagagtctcctggggagattttcctacagtcagggattcctagaccccacctcagacatacagaatttgggggattatccggatggcctactttccaaaagccccttcagtgatccttcaccttcctggcactggttcacaaggccaggtgttagggaatggctggattcaagggcagcagaactggcctgaggagccccttcttatcggctgcatctcaggcccgattcctttattaccagggagaaaggcctctcaaggggtggtttgggtttggaggggattcaggaggagctctgggctgtgggccaggggcagtcctgtcactggcatcgcccatgtgggagtctctgtccccccagcatctgggagcagctcagcagattgatcgagcgcagtctctctggttctccccggatgcccttgggaagtgttaatgaaccgcaaaatggtcagcagctggacagcagaagccaaagcaggtcatgaagttggcagtcagtgagccttatccccgtggtccttgaccatgagctcacaggccaggcaagcaggtccggtgccttggagctcagcaagcgtatcccctcctgggcatggagaccccctgctttctgtgtgctccagagcagttcttgaacctgacagtcacctcaaaccccagcccagggagtatctgccagctgagggttgggagcagcccctgtgttgaggctacaaggccctgtgccaccttgcacactgtgagttgatgagggtgggtgtgtgctcaccctgggggtatctgtcacacccagcagcccctctcattcctctgtctgtgatattgatggggctctgtctgcacatgtacacctgggggtgtccatgggttgtatctgtggtactgacgtgtaagtcagccaggtatcacctttaagcctcctaacaccaccctgggccctttttttatgtcaagttcctgttccagtgttggccacctggggttatggccatgtaaccctatgggtgatactgataatccagtattaccacaacgcaggctgtttttaagggtataatgagaaaatgctggttagcccaaatcctctaaataaagcagccccctaaacaggcacttggcctcttgtacttcatgtcacattataggcctggcagttggtgcagtacagagatggggctcatctcctcaggcactgtgccccccacccagccttaagatgctttctctagcaggcagagctgcagctgcagagctcttggtcctggttgctggcaaactgggaccacatccgtaagataagacgggcaccctccacttcctgggggcttcccctataccccttcccttcctggcagtgttgatgttggttgccatgacaaatggaagggcaagattgctaagccctgagcagctgagcagtgctgtgatgcccagagacaaactctgaccctgtgtttctgcacttgcccttggggatgcagggctagggcatgtcctaggctggccaggttctgtaagcttttggtttggacacgtttgaaattaggttaaagtcagcatctggctatagtgggctccagagagaaaagaacacagaggagcgtgtgtgggaggtgtagggaggaggaggaggcacatcccagcggtgggtcctggcaggagacctcaggctggccctctggagaaaagccccaagtctataataacaaccagctgtcagagtcacctcctttgattgattgattgaaatggggtctcactatgttggccaagctggtctcaaattgcctcaagtgatcctcccacctcagccttccaaagtgcttggggttgtggccgggtacgtagctcatgcctataatcccagaactttgggaggctgaggcaggaggatcacttgagggcaggaggatcacttgaggtcaggagcttgagaccagcctggacaacatggtgaagtctctactaaaaataaaaaaattagctgggcatggtggcacacacctataatcccagctacttgggaggctgaggcaggagaatcacttgaacccgggaggcagaggttacagtgagctgagatcatgccactccaccccagcctgggtgacagagtgagactccttctcaaaaaaaaaaaaaaaaaaaaaaaaaaagtgctggagttacaggcataagccaccatgcctggccttccacctccttcttatataggactgcttagaaagaaagaaaaaaactcaaacatttacagatatgcagatatgcccaatcttttaggctctaagtgaggagtaggcggtgggatgttaggggtggactggtagaacaaaataggccttgttcctgcaggtgccttggaaaaatcgaagatgaaagaccttacattatttcctgggggtgtgagccagccttgttcttgtttaccattgtcaactctgtgcacaaagctatttatgagtcggttgtaacggatacaggaaatatgagcttctgagcctctccctgttgctttgtttcctgctgcctaggtgggaagtcacgacctgacccttgttaaccttcacctggcagccctgaccctcctggggagcgagaatcccagcaagaatcacagtgatggccaccggttggcgagctttgcacagaccctacaggaaaccctgaaaggtaggacattgtcttttgctgtgactcggccactgttttgcagagcagcagggctgcctcttctgagccatctctgaccacttgggctggctgtttgtcagcaatgtgagtcgcgggtacaggggacagtcaaacctctggcatctcatggagcccagctgaccctgcacggccacatctgtgcctctgtggacctagcatatgcgttccaagctgtcagctctgtggctttttagcctcatttagatagaaaggattaggggggaagaatataagtgatgatgcccttccccgaagacagctcatcctgggaccagctgcctcgggcatcactccggtggtgccgcctgcagatttgcatgtgctcttcctgtgaaagagagacgggggtgacaaggggaagtggtaaattgctgatgattggtgaattgagtttttctctctggcgggatacagagcatgttgaagaagccctgaacctgtcagaaatgctggattttaatcttgtaggacctcaggcaagccaccaaaccacttcaggcccccatctgatgggggacagtactcatctcatagcagtacccagagggctaagtaacagtgtctgcagcaataccaagcacatagtagggacttcatgtacacgagttgactctaaaacatgagaagaattaagagaacactgaaaagagcagaattctagctaggcacggtagctcatgcctgtaatctcagcactttgggaggccaaggcgggaggatcacttgagcccaggagttcaagagcagcttgggcaacatagtgagaccctgtctctacaaagaacgaaaaaaattagccgggcatggtggtacacaccagtagtcccagatattcaggaggttgaggagggagaatcacttgagcccaggaagtcgaggctgcagtgagctttgatcgcaccactgtactccagtctgggcaacacagcaagaccccatctcttaaaaaaaaaaaaaaaaggagctgaactccaggacaaaggggggctatgccccaactaatatagatggttttctgcacttggtttaccaaaagaaaaggttgacaaggctgtgaagactgtgatcttatccatctggcttgatttttcagaacactgaccttgtctaggtgagtttgtagttggaggcttggaattctcttctatcttttgagtctggaccaatattctctagctttctaagacttcctcgttaaactggcccctcaaattgggagattcatgaagattttactacaaaaatatttcagtcaaactgtaggctcacatttcaaaagatgtatgtatgtatatatgtatatatgtatttgaatttgcatttctaacaaaaaagattttttactgtggtaaaatatatgtaacataaaatttaccattttaatcattttacatattcaagtcagtgctactaatgtattgacattgttgtacaaacattaccaccatccgtctccagaaccttttcatctttccaaactgaagctcggtacccattcaacgatatctccccatgcgcccctccctgcagcccttggcaaccagcattctaccttctgtctctgtgattgtgactactctaggtgccccaaataagtagaatgataatatttgtccttttgtgtctggcttgtttcacttagtataatgtcttcaaggttcatccatgttgtagcatgtgtcagaatttcctcacttttttgtgtgtgtgtgtcgcccaggctggagtgcagaggcacgatctcggctcactgcaagctccgcctcccgggttcacgccattctcctgcctcagcctcccgagtagctgggactataggcgcccgccaccgcgcctggctaattttttgtatttttagtagagacggggtttcaccgtgttagccaggatggtctcaatctcctgacctcgtgatctgcccgcctcggcctcccaaagtgctgggattacaggcgtgagccacagcgcctggccagaatttcctcactttttgaggctaagtaatatcccactgtgcatccatccaccatagtttgttgcttatccattcatcttctgatagacacttgggtagcttccacctttgtcctgttgtgacaacgctgctgtgaagattgatgtgcagcagcttttcttttgaaccaggacatgccgtgaccaacgttctactttaaggatgagtcctcaggctaaaaacagtcagaagatgctctatccaagaagcaactgtgtgggaaattgtccacctatagttagactctgatctgtaaaatggacaacttgatagcttgtcacatctgtggacattactattgttcttgatctcaaactttttgtggaagcagaaaggaaagatgccagctcataacttctttgacagccttaggcagtcaccatccccccaccccacccctggtatccagggagtagtcaggattttggcagaaaaccttgggcaggttatgttccaaattgccaaggtactattgacccacagcctggcttggccttgactcatccaagtagggacaatgactcatgctgcctgtgtcccctgcttgtaactagtacccaattaattattaactggtgacactccagacccaggggttcaggaagcaattcagcctgcccaggtctaacaagggtagacaagtcagcagaggggttcagctaaagcaaagacaaagccttcattccacagcttctatcagagcaaacagaaccgatgtggttagcaagctccgggcctttctgcctttgtctggaacgtgcatgcaggctgacgtcagtggggatatgccagtcccctagtggaaccttcttccctcagacctcaccaggacttggggacagggtctccctctgtgaactgagcaagagtgaaacagggtgtgtagtaactcttgacatcttggcagatggtccctcagtggggactggttcctgtagttgtcattggcgttttataaatctagagactctctgaggaagtcagcccaaaacgttctcccctcactgctgggaatcaagggagcgacaaaggagcccagcccaggtgggtggctttttaggaagataactcaggctcctgcgcatctacctgtggattctcagaagcaacaactgccttgatgtcatcaccgacgcggattcaatcggaagaacatgagttgtaagaaatccgatgtgctcattcaaaaagggaaccgttgtcactcctgaagctacacagagctggctctattgacccttgacaccagcgtctctcctggctttagaattgtctttttcagcccagacctttgcaggcctgcatcccaacgaaaacctccctcattatatgggaactttgttttctttgatattcaatgaatgtagcatctttctctttgttcctttccaaatcaaactgcaccctaattctgggacatttgtggttccgcttgtctgttgctcacatatttattgagtgcctgctgatgcacttggtgtcgcagtggacagcagccacttccgtgtggtcttccatcctagccctttgtggtgagccctggatttgaggcctggcctggtgactttggacaaaccttcccacctctgggagcctgtttcgtacctgcagaagggagatggtaacagcacctgccccatgggtcgtggctgttaagtgcggtgctatcgaggaagtggtcagcacagtgccatgactattattcaagctggcactgatttctccatggtgtgggtggccctgcaggagaggcttccttccatcccacccattgtcctcactcctcctagaggagggcgccatctgcaatgcacatgcgccctctggtggtggcctgagtggcttcccttcagattcctttccctgcagttgttattacggaagcacacccgtggccaggaaaaaaagatttgccaagtgtcgtggatacatttatgacttcgtttatgaactgctttccctaaagcctccttcacaaggtgtggcagaaatgccacctcctgctgtgggacaacaagggtcaagcagagcccaggggaatcccgcagagcccagctggggggcgagtgttctttcaggatttctactcgctttgcttggaaaatacttcataactatcccacttcctctagggtaaatcagactgtgggagaaatgtctaaaatgctttaggagaaaacctttcccccttggccctgaaatcactttgtagttcttatgcacacatatttaacttccactgtgtgtctctccctgacaaacctgtgaagctgtatcaggaaactgatcaggaagggggcccacgctacatgtgagtgccccgtgccaggcgcttctggtggctcctctaatcctgacaccaacctgggaggaaatggcttgttctttcccttttatagactaaaaggcttgcccaaggtcacgaagctgggaagtgacaaacttcaaattccacactcagagtcatccagctgttttctcttagaaccggggccgagaaccactgttttctttctttcttttttcttttcttttcttttgttttgttttcttttcttttctttctttcttttctttctttttctctctttttctttctctctctctgtctctccctccctccctccttgtctttctctctctctctctttctctctctttttctctttctctttctcttctttcttttcttctttgacagagtctcactctagccgaggctggagtgcagtggagccatgttggctcactgcaacctctgtctcccgggttcaagcgattctcctgcctcagcctcccaagtaactgggattacaggcgcccaccactatgcccggctgatttttgcatctttagtagagatggggtttcactatgtcggccaggctggtctcaaactcctgacctcagtggatcccctgcctcagcctcccaaagtgctgggattacaggtgtgagccactgtgcctggcctagagccactgttttctgatattctcctgtgtcaggttttgtttcattttcagcccctctgtgaccactcttcctcctagctaatttggattcataagtcgaaaagaggacttggaagaataggacacaaaagtgtcactgttttcagagaatatgattgttggtttgttacacctaaagttaaaaaaaaaaattattcccagtaagagaattaagaaaactgcctagttaaaaagttaaaataaaaaattagtccttttgatatatatcattagtaacctgtggaaataaaaaaatttaaaaataaccattagagaaaatataatgggataaaacaaagatcccattcataataaaaatcaaaaatataaaatacttagaaatgtggtggtaaagtgaagaaaataataagacttcagtgaagaatttttttaataaatacttcaatcaatggagaaacatggcaaagtgttcttgggtgagacgtgttaacagttcgaggtacccgtcctttccatgtttccgtgtagttgactgcaccaggtctcagcagagctctttaatattctagttgtggttcccatacctggctggacatgcaatcccagagagcttcaggaaatgctgaagaccaggccaccggagatgctaaatcagaatctctacaggtggaactccaatttctgagagtgggactcaagcattaatatttttatgaactcctgatgccccaagggctttttgtagagctccccggctccaacttcagtcagataagctccacttttacccactctacttttggggcttcctacaggatctcatttgagaaaaggaacacccccaccccatacattttaaaaagaaaaaatgtttagccgggcgccatggctcatgcccgtaaccccagcactttgggaggccaaggcggacagatcacctgaggtcaggagttcaagactagcctggccaacatggtgaaaccccatctctactaaaaatacaaaaattagccaggcgcagtggcacacatctgtaatcccagctacttgggaggctgaggcaggagaatcgcttgaacccgggaggcggaagctgtagtgagccgagatcgtgccactgtactccagcctgggcgacagagtgagactccatctcaaaaaaaaaaaagtttcaaaacttcttatttgaagcacatccatctccaggatgtactgataagaaaaaaaaaagtaggaattgataggtaaagttgctaacatttgagtgaaaataactatgtaagtatacacgtctgctcctctgtgtagagtgtctagaaggggacacaaggaacaagagaacagccttctcctcctgccaaccaaagataagaatgttaaagttaacatgagtttagtttaaaataaaatttgggaatgaaaatttcaatatcatgagaatatataaacattttaaatgaaagaatattaaaacatctagtactcactcaaatattgatcaatatgatagaataaagctcagaaatagaaatgttatacaaaaagatatttaagataacaggccagtattacaatttagttgagaaaaaaaggatttttctagaaatgatactggcagagggggttaattatttgcatgaaaaaataaaagtaaattctaggcaagctaaagagtgaaatgtatcatcacataggaggaagtgggggaaaaaagtgaaatgtaagaaatgaaatgataagaagaacttagtgggtattcgtttgattttggaggcactctaggaaaattctgccagattgtactacatttaaaaaaaatttttttttaacttttgtgtgcttcagtttggtcatagacaaatgaaaaggcacatcacaaactaaaaagaaaatcagttcctatatatgataaagggttaatatgtttttatatggagagttcatataaatcaataaacaaaacactaataccctgtacaaataatagacctatcaggcatcgtttctgatgccgttctctgatgaaaggaaccagggctcctcagagaaatggctgatgcgaggactgagaaaatacacagtatggtaggtcaggcacggtggctcacgcctataatcccagcactttgggaagccgaagtgagcggatcacttgaggtcaggagttcaagaccagcctggccaacatggtaaaaccccatctctactaaaaatacaaagattagccaggcgtggtggtccatacctgtaatcccagctactcaggaggctgaggcaggaggattgcttgaacccgagaggcagaggttgcagtgagccgagatccaccactgcactccagcctgggtgacacagcaagactctgtctcaaaaaaaaaaaaagaaaaaatatgtatatacagcatgatcttggagcatcttgtcgtgtcagaaggaagtgctcaaacaagcaaacaaaaaaaacctgctgggtggatgtcaaaaggacgcatgagccaactgaaagagctctcagtgaccaaagctggaaatatttcaggaacaaagtcaatgacatagtactggatataactcaaggtatacctgacttatacctcataagtatccatgagtccgtactgatctaagtaaatggttgaaaaaattaataaatgggaagaagagatccatcccttgtgcagcagaattccagataacatgtgtagatactctagcctaaaggagggggagcacaacttcattttctacaaatggaagacatcattttcacatatcaaatgaatgttttgatgagggatgcagtgagaggaatttccttaggttgctggggagggttgaaaccagagcagccttggaaagcaggctggcagtatttatccagagccttaacaatggccatagtttttcatgaggactctctatagttctaagaacagaaagctgccaggtgtggtggctcacgcctataatcccagcactttgggagggagaggcggacggatcacttgaggtcaggagttcgagatcagcctggccaacatggttaagccctgtctctactaaaaatacaaaagttagcaaggcgtggtggtgggtgcctgtagtcccagctactcaggaggctgaggcaggagaatcgcttgaacccaggaggcagaggttgtagtgagccgagattgtgccactgcactccagcccggccaacagagtgagactgtctcacaaaaaaaaaaaaaaaaaaaaaaaaatgagatgctcacttcagcattatttatagcagtggctactgggaacagccttaaaagtgaccagcagcaggaaaatggtacattatgtgcatcaacatgatggatggatggatactgtgggctgcccattgaatgccaggaagacccaggcttttcccttggtctcttgatctgaatttgaccctcaagcagacagagtacagttcccaatcgaggagtggctgctgcttatatctccaacctcatctttaacatctggcttcttgataccttgtcctagagaagtagccaactgaacctcaggtacccaccccacccctgggaagccaggctgtttcttagctccctggccttgcataggttccctctcatccatgttgacccaagcacttctgtgcatcctctgagacccaagtcaggcattgtctcctccgggaagccttccctgaccacctttccctgtgctgtgttggtttcagtatgtgtgtttgtttttgcacctactctgtgctcttgtctgttttctagtctgtctctcagagcaggagttgcattttattcatctctggatttcctgcatagtaagtgcccagtagtatgttgagtttttgttaaatatttgggtaagacccttaggtcttttttttttttttttttttttttgggataagatttggaacccataggcttcaacaagggtgatttttgtgtcacgctgcccctgatttccaaacgtgttgctgacttactcttaatattggtggcagggtgatatgcacatgaaatgtggaagagtgaggagagtgagaaccatgccacagtactaaccccatgggagtcaagtcagagaatctcaatcccgtttcaaagggccacggtcagtgttgggttttacttcccaacaactcttaaactcattttcttccttccacttccaggagaaaaggatgtcattatcttaggggattttggccaagggccagacagcaatgactatgatatcctgaggaaagaaaagttccaccacctgatccccgcgcacaccttcaccaacatcagcaccaagaaccctcaaggctcgaagtctctggacaacatctggatcagtaaaagcttaaagaaggttttcacaggtgaggcagaactcacttgtcctttctcctgttcaggaatggagtgagagaaacatgtctgaactgacagaagtcatctcacctcctctgaggcatacataggattgtggtttacgtgactgtataactgtcatttaatcagagacagaatccaggaatccaggcccctgtcagtcccgcgctaaggaccacacagtgctttccagccattctctaattgtttttgtaactattcgttaattttattcaaatatacctcctgctgcttagatttctaaatcctcatttttcaaagtgaaagggagtgtgacaaataattttagaacacccactgacctacagcaagcagatgtgttccaggcaaacctggttatagattggcagagtcctgattcagagatgagctgataacgttacttttaggacacttagtcttctagcaaacatttgtcaaacatgcaagtgttgtgttgtaggatgcagtgtgtagacatgctatgaggtggacatgctgtgaggtgaacaggtgtctcatatagtgtcacaatgggacaggagaaatgctcagtgctctgcaaggagcagggtatgggggtgatttcaccctctctgcagactggtaacctgctgagtcaggacacagtcaacaatatggaagagacagtagggtcttttgatgaaagacaagaacagtatttctaaactctgactggacattttgcgaagccccacggatgcctattatacttcaatgagaaatttaaaaataaaagttgcagggcctggcttttattgcgagagagactaatgggcagccaaggccaagatcttcaagactaggacatctaggcttgactgtcacctgcttctcccctctctcttggggcactagtttcctgttgtactctgtcatgggaggacccaaatgatgaagaaagtgggtctcagggagaatgacaattgtcaaactagcctcggtttgcagaaatgcgctatgggccaggaaaagaggccagcccacggcctttgcaggctcccaggaaggtgtctattgaaggaagagagctggggaagctgagccaacagggctggaaggaagttggaaatcctttcagtggttcccttcctgtgaagttgctgagctcagggaggagttgcccccgctacagaatggtcagcagtgtgtgccaaagctccacccagaatctaggcccatgtcaatcctgcactaaggaccacacagtgctttctagctattctgtagttgtttttgtaactattcattatttaattatattcaaatatacttcctgcttcatagatttctaaatcctcgttttaaaaataccattactttctcataagcttctgtaattttttcttttttaccctttgtgtagaaagaatttccacccctaacccccttagtgtcttttgctttgcaaaactggacctttgctttggacttgggatgtctttatgaggcgtctgtctctgttttgtgatcagattcacagcagcgcgtttatgaggacaggtcagcccatgtgcccatgtgtgtctggatggacaggaggcctgacctctgggtgttttcactgcctaaatgcagaaactctcctttatgtggaaaatcaaactggccgagacctttaatatgcacaggcaaatgcacaggcaccttccagctacctgaggcagcctctccgggcaccccggcctgcagacatgcggtgtgaccctccacctgccaatccaggacctcccgcacccaaccccccatcctgattcccggtctctttccttcctctcccttcaggtcactgggctgtggtgagagaaggcctcacgaacccttggattccggataactggtcttggggcggggtggcttctgaacactgcccagtgctagccgagttctacactgaaaaggactggagcaagaaggacgcccctcggaacggcagcggggtggccttggagcgaagtgaagccaacatcaagcacgagcgatgatgacaccaaatccatgtgtccaccccgggacccaggagggcacagccaaggaatgagccctgtggggtgacgcttcagggcagagctgccttttaatttttattctcagagcatcagcacttgaggccttgccccacgccttctctgtggaccattcaggacctccagtgggggtggcgtgccaggcgcgtaccccaccaggtgggcaaagcagaaacctgcggggagcggagacgccttttatctctggatgccacagacctgagcagcattgggctggctgtccgctgctgactggatggcagcacaaagacaatatgagcagagggaggagaagaaggggtgctcaggctgcgggccacagtccagcagcgccagaagcactcatttctgaccaccaggctatgacgttcctgctgcgcattacagaaagcttttaactgtgatcaggcagtctgctcagatacattgagtggcgatttttagttttgttttgaaaaaataaacagattaacctgcctcgctgcagtgagagcatgggacaagtccgccacagccctcccccgcccccttcccccgccccccaacgcgcagtgtgtatttgcaccacggcaggtgcctctgtgtggagctagggtcaagccctgagcagcttcacttcccctgcgccttttatgtccccaccttgaggccttgcagaggcgcctctcaaggccccatcagctcgccgggacctctgtgaagcctctctgtcatctccccttcccagcccctccttcatcccctgcctccttcaccagcctggcttttgcctggagcactatttgtttagttctctttgcaggacaagaattctctcagggtggtatcacctcctccctcctccccactcactccagtttttagcccggagcctcctgtggttgactatcaggaatgtgtgctgtgtcaggatacataggaagttgacctcggggtatcatggagagtgtccctcctagtggctggaggtagggacagttggttgtggggctggagagaggttgtggggaggaagcgaggatgcgtgcctgccactaggcatctgcatccccgagcccaagccaggagggatttcccttaggcaacaccatcccagggagatctgccacaatttgcgtttcacagctgaagacgccgaggcttagagagctcgacctcctcaaggtcacaccactgggtaaatagagggatgcagactcaggttttgctatgtgctcacatttcaactttatgcttaacatgaatggaaaaatatgaaagtaaatagtgaaaaggtgagttatgagcttagattacctagattattccagtatcccatggaagctgaggacttattccgctttccacaccgaacactaaatgtggaccagtatcaagaaccctcctgtccccacgcagtgtaaacccagtggcttctctgacctggagctgatgggccgtgaagggggcccatttttctccaaaggccatccttttggggccacctggctccaaggagcatcgctggtcttggggacgggaagggaaccctcttccaggagctctaagggtacttgggaatcaattgtgtccattctgaggtctctccagtgggagggcggcagctcctgtccctgggttcaggctgtgcttctggaagcatcgaaatgggatgtctgagccttgaggaaaagcagcagggttagcattaaagtcaagaggggcagctcaggatgctaccagggagcacatcgtttctggtgcctcatctaaaggtaaaacctcccctacattcaccagccggatgtcccaaatccctttagccagattgctttttgcaaccaaagctgtggacagaaaagcctccttaagtgagctgaggggacaggaaatccaatcagatgacctttgtgttcgtaatcgggcttgagccagaggctggggagctgagtcccagccaaacctcactggcccttttgcttttcacgcccagggctcagtggcccaggaagtgtgctgggcagcctgttcttactccagctcaacccattgggtgttggctgtttttggttttagttgttgttttgtattttgttgttttaattaataggctttatttgtaagagcagttttatgtttacagaaaaattaggcacaaagggattcccatatccctcctcttctttgcatatttccccctctaattagcatgttgcattagcatggcactttgttacaactgatgaacttgtattcattattagctacagtgttcatagtttatattaaagttcactctttgtgttgtgcatcctatgggttttgacaaatgtagaatgacatgtatcaccatgctacagaatcattcagaatagttcctctgatgtaaaaatgcccttgtggtggggcatggtggctcgagcccgtaatcccagcactttgggaggtggaggcgggcagatcatttgaggtcaggagttcgagaccagcttgaccaacatggtgaaaccccatctctactaaaaatacaaaatttagccagatgtggtggcgcatgcctgtaatcccagctacttgggaggctgaagcacgagaattgcttgaacctgggaggtagaggttgcagtgagctgagatcatgccattgtactccagcctgggcaacaagagcgaaactctgtctaaaaaaaatacccttgttctccatctattcacccatgcctccctccccctaacccgtgacagtcactgctcttttcaccatctccatagttttgtcttttccagggtgtcgtttggttggaattatagagtatgcagcctgttcacgtgagcttctacccctagccacatgcatttaaggttgctctgtgtctttctatggtctgatagctcctttctttttcctgctgagtcatgttccgctgtgtggaattgacctgcctcccttggattgtttctgtgccttccccggagcttcctctcaccccagccccagctccacccacaaatgcggcatttctgagtccacctcttccattctccctctccattcttttcttgcttctccatcttccaagattgtctgagaaggggcctaactgcgaaggactttgttggagaagccaagggaagtcccctgctgctgaaccggggctgggaggggaagaagggattaagtacaagaaaagctcttccagtcccacaggcgctgactaggagcccacggcattctccctgctctccctatcataggagaaccgcaggcagccaactgtcccttccacgccccaatggaacctctctcctctcctgcccattgtctaccacagatcagagatggctctttctatgcaggggtggggacccagccatctctatcagctctgccggcactgcaggggtgactgactggaggcgggaagccctcctgggcctcaaataactaggcccaagctttgactccctcatggctgctctagggactgcaagggaggacacgggcttggcctttcctaaagggctgctttctttcgaagtcaaggggatgctattttcttctttgtgtttctttggttctgacatcagaattctcctcagtgcagataacattgccctctggaatgggtgagaatcctaacacctgggttttcggttctgcccagcgtggcttaagtctccaccttaagtgaatctcacctgagacagctacagggtttgttttctggggagaggaattaatgacttgagcagcactcacgggtcttaaacttagcatacagtttcaaataacccatgcccccacttattgaccccttactgttctaagcacttcatactttaaactgacttcatcctcagaacagtgcaatcaagttggtcctattatctttcttctgttcctttcacagaggaggaaactgaggcatggagaaggtaaccaggctagggctgtacaaggagaaagggcagagccagaatgcctgcccaccagcgttgcacttctaccagcacgccctgcacccagaggcaaagtgcctctgcctgggcttagttggacataaactcttacaccacagacagagtgggtggcacttctcccctgaggaccccgggtgtgttgtcactgctccatggctacatgcccaggatttggaggcagcaggcctggcttctgtcccagctctctgtgtcatagctgctggcccctgcacgttcaagatgtctggcaaagtcccagttttcttgtctattaagtgaggacaaaacctctctgagaaggttgtgaaaaacaaacatctgcccagctctcagggcatctgaccgcagggccagtggtgtgacactgcagggaagccatttgtttcaaatgctctgacacatcataagggctcactaagtggcagcgtttctaaaaataatctttcactgcttatttcttagtgtttacattgtatccccaggctctctctgctccttccaagctttgtggtttcccaatagcatggaattctatactttccactggtcaatttgggccctcggaagtagggacccctgggccagtggtacctgtcacatgcacactgattattaagaaaaacccagaggctctctcagggccaaaaaccgctgctcccaggctccagctgttcctggtagagaaactcagtgggaaactcaataaagcttctctggggaccacacacacacagcaccttggatttaccatgagcacaaggacaggaggccactgggtgaattcctgtggggagggacagccaacattccctgggatggtcactgaatttggcaggcccagcctctccaaggagtgtccgcagagcagcctgcatgagcagacacattgtgagtggtgttgtgaggggcttgggaagggtaggtcatgcagtcagggggcaggtcattgtgcttctagaggaatcagccgggagaggattggagacgacttaagagctcgtgcctcggcatgatccaccactgcatcctggagagaaaacccccctgagaggggcagtgtttgccaagggatgctttgttggtgcaggaattgaggtttgagggtgaatgagcaaaggtgttggccatgcagagttgtgaggatgtgtacacaacgacacgtgctcatgtgtgcacaccagataccctagtgtactgtgcttcattaatgggcttaagcagcctgaggcctgttggattttcggggtgccggctgacaagtcctagggctgggctggtgcaaggctgcattagcagttcagtgcctggagatgttttcttgggcttgattcctacttctcccccctcagtaaaggaatacttggatgttttactttgaaatgctttaaataaggacaatccaattcagtatggccttgaggtgtgatttctaaagtggtttggatggagccatcacttggatctgagtggctcgttggtacagaactctctctctgggccaggctggaagttgcagtgaaccctcattcagagcctctgggaccaggctgacactggacacttccttcctaggaacttcatgaatagcaccttctccagcctgcccacttagcagctggctggttagaataaattaagtaagtgaaataagggagagaggaagggggaggggagagaatgatcaaagcccaagcatccatccatccaactcatatttactgaaggcctaatgtgtgcctgacacttcacgggataatcccttttgtgtgaagcttacagtttagcagggaagacagaattcattattcatagctattgacattattacaaataacaattattaaaaagccatctgaaaaagttgcatggaaatttagggggaaaaaagccccgatttaagataaataatccagttcagtaaacatttttaaaattaggaccccccccaaaaatggtgctgactcctgaaatggaggccacatgtgtttgaacaaattaaaggccaccttggatgagcgtagcatgcgaggcccgctctcccgtgctcccactctttcatgcccccacgctcccactctcctgcgctcccatgctcccactctctcacacactcgtgctcccatgctccccctctcccatgctcccatgttcccactctctcacgctcccgtgctccccctcttccatgctcccatgctcccactctctcacgctcccatgctccccatctcccgagcttccgtgttcccatgctcccactctcaggctcccatgctccccactctcacatgctcccatgatcccatgctcccgctctctcacgctcccatgctccccgtctcccgcgcttctgagctcctacactcccatgcttgccaagctccaccattgtgccgtgtgctgtcgtccctgttcctaccatgtcttctcacaaaactttcaggattaagcaattcctagccaagaaacaaaaacaaaattgtcccattccccagtggattcagatggaaactggtaataaagacaggtactggccgggcgtggtggcgcacacctggagtcccagctattcgagaggcagaggcaggaggattgcttgagtctgtgagttccaggctgcagagagctgtgatggcaaaaaccatcaggtacaactcccaggagagacactggagcagaaccaagctgggcctcttgggaactgggtctgagatacgcacatattgatgcaagatccctagtgtctgacctcatcaagccaaaaacattaccactattgggacagttcaacatattttattagggaaaggatttttctctttgttcctatgctctgaacttgtagtttggcttagtaataaatatgtaagacttttttgagctgctaaaagaataaagttctccacaggactcgtagagagctatgcaggcagaggtgggctggagtcagctcctacttgctcataggagctgattgttcaagtttcaggaattttaccagccggctgttagttattggtagctaggctttgcccttggtgagagtatttacgccatgaagattgacaaaggctacaaatcagaacactttccactgagagctcgttgttagacatttaccagcacatcaccaaggccagggcttggttcttcagtgcaaaacatgggtggagacccagctcctccatagctgggaagatatccagaggatggagatgcttcagtctggaaagacacggcctgtcggcttatatgaaaaaagtctcgaaaccacacaaactgccaaactatactgagggagaagcccagactcctcattgagccttgcaatttttaaagcatggattctgttattttaaaatgaaaacaagtaccctcttctgcagtcaattcagagtcttgactgcccttctagcacccttcctcattgctgaccctgagccttagcgtgtgcttttcctcctgcctaaaatcttctatccactggaatccacccaacccagaaacccttcccaatccccgccccaacatccacctccagggtcttctgcaaccactccatcccatgccggttccctgcctgcctcgactccggtggtcctaaacgtccatgggatttcctggcacttatttgctcactgtcttgccttgctacttaacgtcagatggaggttcaagtggtttccaatggggagaggtgcatttcgcaatgtctggagacatcgttggttgtcacagctggggtgatggtgctactggcgtctagtgggtagagccccgggatgctgctaacatcttacaacgcagacaacccctgcttctccagcaagtctgaccccaaatgtcaataatgcagaggttaggaagccctgttgtacactagtgaccacatcctagttcaaacttactctccaaagaaccaagcacagagccaggcatgtcatagaccttcaattgttcgaggcaagtgtgcctttactcacctcagggcttatttccagaacacatttcttctaccatgattaccacccactcccacctccctcctccctcttccaaaccctgattgaaaatataaacaagtacgagttacataaattgatagataaaaagaacgggttatcaatagaagcctgcagtgtcagaggtgcacctgcatcttctgggtactgtaggacttgcattcctttccagaaatgtgccttttaagcctctgcaagctgaaccctgttctctctctggccacctcccagtggctttacttctgcccttcatcagcttagctgttgtcatacagattgcagagacattcttgctgcacagaagccaaatgtagttgtaagaataatttatggatggttccatccatccacattaaaaaatagttccttatcagccaggtgcagtggttcatgcctgtaatcccagcactttgggagtccaagacgggtgggtcacctgaggtcaggagttcaagaccagcctggccaacatggtgaaaccgtgtctctactaaaaatacaaaaattagccagatgtggtgctgggcttgtaatcccagctactcgggaggctgaggcgggagaatcacttgaacccaggaggcagagattgcaatgagccgatatcatgccatcacactccagcctgggtgacagagcaagaatcaatctcaaaaaaaaaaaaaaagttctttatcatctgtagtgggtcaggcactgtactaagcaggggtgagcttgtatctttgacagccataggacactaaccactaaccaatcagatcagacactagaataggagctgggccagggagacagacagacagacacggacacacccaggcagacgatgatactaggaaggggcaaggcaggaccacagcaaaggccccagtgaaaggcagcaccaccacgggcaggtgctgttctggccccatcctggagaacggggctggcggaagctcgtggccctcctgggaaggcctgtttccgactgtccccagagactctggggatgaatgaggtatggcctaagcttgtgggaaaattgcaaatcaacactgcatcctggaaaagcactttggtttggcctcgagtcactgtcctttcatttctcttctgaccacagtgagtgccccgtgtgaggatgactgggtggaggtggcgtcttgctggctgattgccttccagtggagcagggaccatctcttaggtggacaatgaaggcaaaattaaatttttcaaagaatttgtcagccacattagaattggtatttatcaagggcttattagggccagaagttatattagaaactttatgaatatttctcatacagttctccagacaatccggtgaaacatggcttagtacctagggtgccagggctcagagatgaacaattttccagaagccagaagtggaggtgggagctgaaaacagcctaactccaaagcccgtgttcttttttttttttttttagacaatcttgttctgtcacccaggctggagtgcagcggcacaatctcaactcactgcaacctctgcctcccaggttcaagcgattcccttgcctcaacctcccgagtacctgggactacaggtgcgcaccaccatgcccagctaatttttgtattttttgtagagacgggatttcaccgtgttggccaggctggtcttgaactcctgacctcaggtgatcagcctgccttggcctcccaaagtgctgggtttacaggcatgagacaccacgtccggccaaagctggaattcttagcccatacttttactctattctctttctctttctctctctctctctctctctctctgtgtgtgtgtgtgtgtgtgtgtgtgtgtgtgtatgtgtaacagagcatttttgtttccattcttaaatatattcttaattttctgcaatgaatatgaaagcatcaatttggtaatcagaaaggaaataatataatcacgagcacaaagctgagttaagaaaaaacggactgaactgacttcccttcatcctgcagcctgcaggccccttcctcccctgggggtgctgctgctccagccccctcctatctcatctttccttagggagctgtcttgagagagagactgagacgctggtctccccgcagcaggtcctgacagcggtgacttatccaagcagagcctcaggcaccactctcttcttcaaaagttaccagaacaacccttaggcaacttcttccgggtcagcccaacggcctttcccacacacctgggcccagcctcaggtgtctggagtatttcctaagtagaattggggaagatgtctcaaatcacgccaggcagcagccatctggaaaattgctgctggcttagcacccttgggcctggtgggtgaggaggttcttccggccctgggctcctgcctggtgtcccctctcagtcagcgcctctacccagggcaggagcagcctccgtggaagggtgagacaagctggctgcagtgcaggacagctctgctggttgggtagagcggagacagcagaggaacttcagcctcccagaagagtaagagctgagcgaagctgtgaaaggggtatccttgcttggttcatggtgggtacctttagcccttgaaagcctcagttccagcccagactgaggaatggcggagcgcctccccagcagagaattctgctgtgggaatgaatggttgagctccagggcttccggcttcctcctctcggttagcagcctctcctgccgagagccccctgggccctgcagcctgggcctgcccatcatcagcccagaaggcaggaggtttcataaaacagaattagaagtgcaagttttctagaaactttaggattaattaataaacagatggtctatctcttcctccttccccggcatgggaagggttgagtagagttagaaatccacttaaatttgcaaaacgtagatagttgttgaacctgggtcaagggaacataggggttcataatacatttctttctacttttgtgtatgtttgaaatgtttcacaacacaatgaatacaatgcacaaataataaaaagcccaagccacaaaaaataataaaacacactttttaaaggaataaaaacatatttatttaaagcataacttttttttttgtttgaagcggagttttgctctgttgcccaggctggagtacaatggcgtgatctcagctcactgcaacctccacttccccgggttcaagcgattctcctgcctcagcctgccgagtagctgggattacaggcatgcgccaccatgcccagctaattttttttttgtatttttagtagagatgggctttcaccatgttggccaggatggtctcgaactcttgacctcaggtgatccacccaccttggcctcccaaagtgctgggattacaggcatgagccactgcgcctggccaaaatgtatactttttaaaagaatcagcaagtactgcatttccctgtagaccgaggtgccagcgttctcgcagttaggggtgggcgtgtgtggaagggatttgcctctgtaattccttccttttatgccagtccctggaaagaatcaccaaaaggaattcagtgtttaatcctaaaaggggaacattaaaatgtatgtatttgaagggtaaattaaaagtcccagagagaaaagaagaaagggctatttaaaagccctcggttgctttttgtgcgttaatcacctgttgggcacccaccaggataggccctgggagtggggttgggggagagggagcaggaagatccctgccttccagggccactcctccctggtctgggttatacggtctccagtgcagcgctcctgcagctgcgcaagcctggatgggaagctgctagccaggccggagtgggatcctcttgtattccatgttcacctctccgtgagtctccactaaagatgtggccaggaggagtctgagcacccaccaggtcaaagggaaacttctttctctctctcctggctcagagaagcctcacccaacagccaggcaaaacaattcatccctccatcttctatcatgtgtaagaaaaccgtgggtcaccttaatgaaatttttattttttttttgagatggaatttccctcttgttgcccaggctgaagtgcagtggtgccatcttggcttactgcaacctctgcctcctgtgttcaagcaattctcctgcattcaagcgattctcctgcctcagcctcccgagtagctgggattacaggcgcacatcaccatgcctggctaatttttgtatttttagtagagacggggtttcaccatgttgacaaggctggtcttg

SEQ ID NO: 1088 - DNA, 4870 bp, Homo sapiens
gccgccccctcttccatggccccgcctctcccactccaggcccgcccttgcgctctcgggttcctctctccacccactggtgccaggcctcgccccgcgccagggcccctcccccacgtgccctcgggagtcccggggaggagttgccgcgcggaggaggcgtggccgcggtgcctgcggaggcgcgagcggcgcggcgcggcgcggccgggactttggctttgacaccgactgcgagcgggagccgtgcggctggtgctgggtctggactggctctggcggatccccgcccgagttgggcgcaggactttttgccggggtaaacgcaactgcggcggcgccgccgcaagccccggtgcagcctcggcggcgggtttcgccgccgctgccgccgcctccgagcagccctgcggcttctattcactctgggagagcgatgctaagtttctcccatagaaagagccgggacacgcagaccgaagcggcgtagtcggcttccagggcctgaccagtgacccacacccgcgcggacgcctaggctggaggcagggggcccgtgctgtcccgggctgggctcaggcttccgagccgcaggtggaagaggaaccggcgccccgcagagcggccgagaggcggccaagtgaaaggtaattttggacacgccaggcatggaagattcggtgtttgtctatagtaacctcttcagtccctgaatcctgcaccttccgtttttctgtgcttgtacggcctactgggcttcctccctagccagagagctcttctgcagtggtgcggccttcccgggagcctgatcctggcggaccatggggagcaccctgggctgccaccgctccatccccagggacccctcggacctgtcccatagccgcaagttcagcgcagcctgtaacttcagcaacattctagtgaatcaggagcggctcaacatcaacactgccacggaggaggagctgatgaccctgcctggggtgacgcgtgccgtggcacgcagcatcgtggagtaccgagagtatatcggtggcttcaagaaggtggaggacctggcattggtcagtggtgtaggcgccaccaagctggagcaggtcaagtttgagatctgtgtgagcagcaagggcagctcagcgcagcactctcccagttccctgcggcgggacctgctagcggagcagcagcctcaccacctggccacagctgtgcccctcaccccacgtgttaacatcaacacagccaccccggcccagctcatgagcgtgcgaggcctctcggagaaaatggccctcagcatcgtggacttccgccgtgagcatgggccctttcgcagcgttgaggacctagtgaggatggatggtatcaatgccgccttcctggacaggatccggcaccaggtgtttgctgagaggtccaggcccccatccacccacacgaacgggggactgaccttcaccgccaagcctcacccgagccccacttccctgagcctgcagagtgaggacctggacctgccgccaggggggcccacccagattatctccactcggccgtccgtggaggcctttggaggcacaagggatgggaggcctgtgctgaggctggccacctggaacttgcagggctgttccgtggagaaggccaacaaccccggggtgcgagaggtggtgtgcatgacactcctggaaaacagcatcaagcttctagctgtgcaagaactgcttgacagagaggccttggaaaagttctgcacggagctaaaccagccgaccctgcccaacatccgcaagtggaaggggccccggggatgctggaaggctgttgttgctgagaagccctcgaatcagctccagaagggagctgggtatgcaggattcctatgggacgcggctgccggcatggagctgagagacgcgggttcacaggagagctcgccaagcaacgggcacgggaagctggcgggccccagcccatacctcgggaggttcaaggtgggaagtcacgacctgacccttgttaaccttcacctggcagccctgaccctcctggggagcgagaatcccagcaagaatcacagtgatggccaccggttggcgagctttgcacagaccctacaggaaaccctgaaaggagaaaaggatgtcattatcttaggggattttggccaagggccagacagcaatgactatgatatcctgaggaaagaaaagttccaccacctgatccccgcgcacaccttcaccaacatcagcaccaagaaccctcaaggctcgaagtctctggacaacatctggatcagtaaaagcttaaagaaggttttcacaggtcactgggctgtggtgagagaaggcctcacgaacccttggattccggataactggtcttggggcggggtggcttctgaacactgcccagtgctagccgagttctacactgaaaaggactggagcaagaaggacgcccctcggaacggcagcggggtggccttggagcgaagtgaagccaacatcaagcacgagcgatgatgacaccaaatccatgtgtccaccccgggacccaggagggcacagccaaggaatgagccctgtggggtgacgcttcagggcagagctgccttttaatttttattctcagagcatcagcacttgaggccttgccccacgccttctctgtggaccattcaggacctccagtgggggtggcgtgccaggcgcgtaccccaccaggtgggcaaagcagaaacctgcggggagcggagacgccttttatctctggatgccacagacctgagcagcattgggctggctgtccgctgctgactggatggcagcacaaagacaatatgagcagagggaggagaagaaggggtgctcaggctgcgggccacagtccagcagcgccagaagcactcatttctgaccaccaggctatgacgttcctgctgcgcattacagaaagcttttaactgtgatcaggcagtctgctcagatacattgagtggcgatttttagttttgttttgaaaaaataaacagattaacctgcctcgctgcagtgagagcatgggacaagtccgccacagccctcccccgcccccttcccccgccccccaacgcgcagtgtgtatttgcaccacggcaggtgcctctgtgtggagctagggtcaagccctgagcagcttcacttcccctgcgccttttatgtccccaccttgaggccttgcagaggcgcctctcaaggccccatcagctcgccgggacctctgtgaagcctctctgtcatctccccttcccagcccctccttcatcccctgcctccttcaccagcctggcttttgcctggagcactatttgtttagttctctttgcaggacaagaattctctcagggtggtatcacctcctccctcctccccactcactccagtttttagcccggagcctcctgtggttgactatcaggaatgtgtgctgtgtcaggatacataggaagttgacctcggggtatcatggagagtgtccctcctagtggctggaggtagggacagttggttgtggggctggagagaggttgtggggaggaagcgaggatgcgtgcctgccactaggcatctgcatccccgagcccaagccaggagggatttcccttaggcaacaccatcccagggagatctgccacaatttgcgtttcacagctgaagacgccgaggcttagagagctcgacctcctcaaggtcacaccactgggtaaatagagggatgcagactcaggttttgctatgtgctcacatttcaactttatgcttaacatgaatggaaaaatatgaaagtaaatagtgaaaaggtgagttatgagcttagattacctagattattccagtatcccatggaagctgaggacttattccgctttccacaccgaacactaaatgtggaccagtatcaagaaccctcctgtccccacgcagtgtaaacccagtggcttctctgacctggagctgatgggccgtgaagggggcccatttttctccaaaggccatccttttggggccacctggctccaaggagcatcgctggtcttggggacgggaagggaaccctcttccaggagctctaagggtacttgggaatcaattgtgtccattctgaggtctctccagtgggagggcggcagctcctgtccctgggttcaggctgtgcttctggaagcatcgaaatgggatgtctgagccttgaggaaaagcagcagggttagcattaaagtcaagaggggcagctcaggatgctaccagggagcacatcgtttctggtgcctcatctaaaggtaaaacctcccctacattcaccagccggatgtcccaaatccctttagccagattgctttttgcaaccaaagctgtggacagaaaagcctccttaagtgagctgaggggacaggaaatccaatcagatgacctttgtgttcgtaatcgggcttgagccagaggctggggagctgagtcccagccaaacctcactggcccttttgcttttcacgcccagggctcagtggcccaggaagtgtgctgggcagcctgttcttactccagctcaacccattgggtgttggctgtttttggttttagttgttgttttgtattttgttgttttaattaataggctttatttgtaagagcagttttatgtttacagaaaaattaggcacaaagggattcccatatccctcctcttctttgcatatttccccctctaattagcatgttgcattagcatggcactttgttacaactgatgaacttgtattcattattagctacagtgttcatagtttatattaaagttcactctttgtgttgtgcatcct

SEQ ID NO: 1089 - protein, 565 aa, Homo sapiens
MGSTLGCHRSIPRDPSDLSHSRKFSAACNFSNILVNQERLNINTATEEELMTLPGVTRAVARSIVEYREYIGGFKKVEDLALVSGVGATKLEQVKFEICVSSKGSSAQHSPSSLRRDLLAEQQPHHLATAVPLTPRVNINTATPAQLMSVRGLSEKMALSIVDFRREHGPFRSVEDLVRMDGINAAFLDRIRHQVFAERSRPPSTHTNGGLTFTAKPHPSPTSLSLQSEDLDLPPGGPTQIISWSVEAFGGTRDGRPVLRLATWNLQGCSVEKANNPGVREVVCMTLLENSIKLLAVQELLDREALEKFCTELNQPTLPNIRKWKGPRGCWKAVVAEKPSNQLQKGAGYAGFLWDAAAGMELRDAGSQESSPSNGHGKLAGPSPYLGRFKVGSHDLTLVNLHLAALTLLGSENPSKNHSDGHRLASFAQTLQETLKGEKDVIILGDFGQGPDSNDYDILRKEKFHHLIPAHTFTNISTKNPQGSKSLDNIWISKSLKKVFTGHWAVVREGLTNPWIPDNWSWGGVASEHCPVLAEFYTEKDWSKKDAPRNGSGVERSEANIKHER

SEQ ID NO: 1090 - DNA, 50704 bp, Mus musculus
  misc_feature (1)...(50704): n = A,T,C or G
ctgaccctctctccccttacccccaggaaatattttagagatgaaacctaatagacctaaacccaggagactaagggaaaggatggaatgagaagtagattcaagagctcaagcaaacatatcagaacacccagcaaatgccaggacgtgtgcatgctgtgggacacaggaacagtgttagatcggtcctcttggagggcaaatagagagagaggtgccctggacactgagagatccgcacagtaatagaaatctgccccctggtaccacaaaggggagagccattaacttctgcttgtacacttgaaaggaagagttctcaggcaaagaggtaaggctagactctatgggagatgggactagacaagaaggaaggaaactgggaaacagcattccaacaccttgatgttttccctttgggctgagatacccacctgcttggaggtcacaaatgtcaaggcttagaggaatggtgtgttttcttggctgtgttactgagaaggctagactgactccatgtcagccttcaaatcggcagttcaggagactaggcctaagtccctgtttccaagaactggacaagtccaggcctcagaagctgccctgccacctggcttgaggcaaggacaatgggtcagcagctgtttccagacttccccagcaaagtttacaccccctccccatccctaggccccagcaatggttgttctggaatgtccctagagatagagccaagattaagatagaggtcacctacctccacccccaccccatcaccagaattcccttaatgtgctttatttaaatcgggcttgagagctcacttctgggtctctccatctttgtagatggtagaccccaacatgctggacttctgcagaataaaacactctttgcggtgtctacaaactacttgagtccggggcatcattcttcagcaaatctcggacccttccattaggagccactgacgtggttccatttacaccttggacatctagctcgatgacctgatacagttaatacccacgcgaaggcatacatagctcccaagtcttcatttcccctgagacacttagtgagattattcattgaatagcactcgacttcttcctacgtgtacttatttgtgtacgtttgggagccctgggacgctcgacgctcgtggggatcagaggccaattttcaagagtcagttctgtcttttaaccatgtggatcctgagatcaaactcaggtcatcgggtcaccagactcagggacaaagtgtcttcactgcggaggtatcttgatagctagcaccatttagtaatatgtaccagcatttactgtatacttggcagagaatgcataacctttgagatggtgcaaaggttaaatatgtaaaaacaccccctcagagggctcagtcttctgtcaggacggaatctcgtgcctctactctccaggggcacttgcattcatctatttaaagtgactgctgcgtaaatggcagaagcacggatggctgaatgaattaagaaaataattacagcttgttggttctagaaacaagatttaattagaaatttgagaacttcattgcaaaagctagcttcacctttagcatcaaaacagcttggcggccacctaggcggccctcggtcagaatgcctattgtttgctgcagcgagcggcgcttgcggcgcggcgtgctatgagtcaggccctgtgcagacagagcatgccaaggtgcttttctcacactccgcccccagaggcacggggtcggccctcatttcacggatgagcaggcaggctttgcgaggtcttcttgctccaagatgagtcttccccttcttccagagaacactgctctgactaaacactgctgctggatcattcccacctgggttttagttcctgcctaaggtagcagagcggctagggaggctcctgctttagggctgggcaaaggcagtaagcaaggcatggcaaataaatgggatatcaagcaagggggaggagcacagctttaagtacctttacctatgtacacattcctgccagacagcagagcagggtggtgcacatctgtgatcctaacacttaggagactaaagcaggaagaccaccagaacggacgccactgtcagggtcacttaacaagactgtatctcaaaataggaaaagccaggggtgtgtgtgggtgtgcaggagatgactccacagttaagagcactggctgctcttgctcaggacccgggtgcaggtaattcccgctccaaagaatctggtgtcctcttctaccgccaggcatgtaaatggtgtacggacatacaggcaggcaaagcactcagaggcacataaaagaaataaacctggtaaataattttcttaaatcatgaaaatagtctcagcagtgactcagagaagtaggtccagcttcactgttttgaagagagatggggacttcattttattctgtcagtaatggagaatcattttaagtcctctcgagctggctggtgatccgactggaaaattcctgtgcctttccgcgcccaatgggctagagagggagaggcagaggaagactaggaagttactggaatagtccaaacaagacgggggggggggggaaatctcccgccttgggacagtggcagcaataatggggggtgaggggtgggggtgggggtagggggtgggaggtgagggtagaaagtgataatatagaggaagaagtgcagggctttcctccacctggcagagctgttaccaggaggccattcccagggaatgaaggagggagggaagactgcttcagtttgttgattagaatggagaaaaatctgtgggatcaagaggggctaagttcggggtcatcttgaggcccctgggctacagaagaccctgactcagacaaaccaaagaatggaaaagattttgagcatgaatccaagttgaagggaagatccaacaaagggagagtctaaggggtggaagcggtgagagacagagaagctggcatagtggcgctcagcctcaggggtgcagaggcaatcttagcgactttcaggccagcctgatctacatagcaagttccaggacaactagagctacatagtgagacactgtttataagtaagtaagtaaataaataaataaataaataaataagcaagctaccatgctctgcttcaggccttggttttaaaatcacagttctagccaggtggtggtggcacatgcctttcatcccagcacttgggagacagaggcaggcggatttctgagttcgaggccagcctggtctacagagtgagttccaggacagccagggctatacagagaaaccctgtctcgagaaaaaaaaaaaaaaatcacagttctacttccaaggcctgggcacgattcttgattgttcctgctctctgctgcccactcagagaagagtgctcaggaacagcatcctgtcacaggctcagccaccgctgggatcctgccatcacagcagctcaacaaggtcacaatattacctttcatcaactgccccagaacggacttgggaagtccccagcgggaccaaagcatctggcatgaggagtgtgtcaatttttttttcttgatctgaatagacctaagtttatgcctaaacacctagtttccagatttcactgttctcccagccacacattttcaaactaataaataagtaaaaacgagtggtgcacagtaatcttagggaaactgaagaccgaaatgaatagcaagacctctgggtgacgaccatgtgtgactgatgaggcccagagacacctggcaagctgagctgtggtgaggggacatcacctgtcatagcgaataaaactgcaaggtatatctggctgtctccgaagtatgtctcacctatttccaatcttctttgtcctattgagaaaggacttttcagtttgtttactctggaggtagatttctgtatctttttcctgaaaaagcataattttataaatgtaaagatactatgtgtactagaaaacaactcatttttacttttaccttttctacgtatatagttgttttgcacttatatgtacgtacatggtgtgtgtgcctgatccagaagagggtcagattactggaactttgtgttagagtcagttgtaagctgccatatgggtgctaggaatcgaactgaggtccactgcaagactagtttctaacctctgagccatctctcaagactatctctcatctgcattttttttaaatcacatttaattgtgtgtgtgggcagaggggtgaggctgaggacaatttgtaggattaagttctggtcctgaggcttagctgcaaacattttacccactgggaaacctccactttttaaaaaaatatcttgtttgagatgtatttatttacgttatgtatgtgttctatcagcatgtgcacctgcacgccagaagcgggaatcccattagagatgcttgtgagcgactctgtgggtgttggggattgaatttaggacctctggaagaacaaccagtacccttaaacactaaacaatttccccagtctccccccctttaaaaaaatacatggcctcattgtgtacccctagctggcctgggactatgtaggccaggctggcctcaaactcacaaagattcacctgactatctcccaagtgctgggattaagggcacttgggcaacagaagcctggtccaaaaaagtatttttatggagattaataattacaattcaccttaaaataagaatgggggggggaggtgaagaatcagggcaagagatttagcttagtgctaatctatttgaattagggagaaaaaaatgtgtcataaaactgaacccacattaaaaaaaaaaaaaaaagtctggccacatggagtcggagacatctttaatcccagcagcaagaggtagaggcaggtgaatctctgtgagtttgaggctagcctggtctgcagagtgagttcaggacagccagggcaacagagaaactctgtctggaaacataacaaaacaaaacgcagaaaggaaggaaggagaaagaaacaagtagaaagggaaagagtgacagagggagggagaaacgtgagttggagagatggccaagcagttaagatggctcatcggttaagagcactgactgctcttccagaggtcctgagttcaattcccagcaaccacatggtggctcacaaccatctgtaatgggatctgatgccctcttcttgtgtgtctgaagacagctacagtgtactcatatatataataaatctttataaaagattattatatatataataannnnnnnnnnnnnnnnnnnnnnnnnaggcagaggcaggatttctgagttcgaggccagcctggtctacaaagtgagttcccaggacagccagggctatacagagaaacccctgtctcgaaaaaccaaaaaaccaaaaccaaaaccaaaccaaaaccaaaaaaaaccccccacaggctgcacttgcgaacagcatggttcatttccagcacctacatggtagctcacaatcatgttactccagctccaagggatcagaggaccccttccggcctcctcagttcccaggcacacatggtaaacagatatacaggtccccatacacatcaaataaaataaactttaagagaaataaaaacaatttttaggtcaggggttggtggcgaatgcacttaggaggcagaggcaggtgtccctatgagctcgaggacagcctggactatacagagtgagttccaggacagccagagctacacagagaaattgtcttacaaccaaccaaccaaccaaaaccaaccaagcaagcaaaaggggcaaacaaagcctcatagcttttcctaagagatcacttagcttctctccagagtgaacacaaggtatgggcctattcccttgcaggagtagctattttaaaatctgggtgggagataaaaatgctttaaactcagaattgcaaaaagcatcaccatcatcataatacattaagagtgctgggtgtggtggcacaaatgacaactggctattattctactctgtgcttgctatggcaagcatgcactggagtttggtagacttgggctctcaagtaaaaaacaaaaaacaaaaaacaggagagcgcagcggtttaaaaggggggggggggcttcagacttattctgattggatgttgctagctaagaagcaggagggctggaagcagggagtcattggtttagagagcatatttggctttctctgattggtctcaagttggaagcagcggtaaaaatatggaagctgcaagtcagtgactaagtactgactgtccaggattccctaacgtcggtgtttagtaaggaatcgcactgtcccaaagggtttaaccactgtcagtatttccagccctccagcagcgtaagacgcgagtttttaactttctccggcccagctcgatttttacttaacaaacaaaacggtttgttttgcttggaacaagacgactttctaggttaaggataagacatcaggatccgagaatcatagaaacaaacgcacaaatatctgcagtaagggtcaggcaggagaatctacgggtctcccatttgcacagcgagccctcactggtagaggcgatccgcccttctttctagaagagtgccactgcgggcaggagcaaagggtcacctcgcctgcactccgggtttgatagcccacgaccgagggcgcgctcccggctcactgcttcccccggtgccccttcccgctccctctcagacagcatcggccccaaaggccccacttttctgcacgccctggcctcgcagcgtcctcccggccatcccagctcagcttccggacccgcgcaggctgccctccgagtgtgtccgaggtcagcagtcagcagacgtcccctccggcccgggacccgtcagcccagctccgaagggacgaacgaaggcaagggcgacagtcctcggccaccgccattcatttccccagcggtctcgtcagctctgcaggcaagccctctcgcccgtccgtccatccgtccgtccctccgtcccgaaagcaaccccgtgtttccctgagctcggccccgtcaaaggccggtctctcccgaccctcgcccgccgcgcccaggaagccgtgacgccgcggcggcagctgcagcggccgagctctcgccatcttgtgtggaggaggaggagccgcggccgccgccatgcggagcggctgggaaggagggagggaggcgacggcggcgggcgagggagggggcagagcagcagagtcagctcagcccggcggcggcgacatcgggggcgccggcacagcgggcgccggccgaggtagtgcggggtggcggcggcggcggcggcggcgagctgcgcgggcagcgagcgtcgcggcgggggcggggcggnnnnnnnnnnnnnnnnnnnnnnnnnnnnnnnnnnnnnnnnnnnnnnnnnnnnnnnnnnnnnnnnnnnnnnnnnnnnnnnnnnnnnnnnnnnnnnnnnnnnnnnnnnnnnnnnnnnnnnnnnnnnnnnnnnnnnnnnnnnnnnnnnnnnnnnnnnnnnnnnnnnnnnnnnnnnnnnnnnnnnnnnnnnnnnnnnnnnnnnnnnnnnnnnnnnnnnnnnnnnnnnnnnnnnnnnnnnnnnnnnnnnnnnnnnnnnnnnnnnnnnnnnnnnnnnnnnnnnntgggggcgggcggaggtttccgaggaggaaggagccgccgccattttgggagcttcgagtcaacaataaaggaccgagggtgcggagcgggagtggcctcggtggtaggactcgggcccgagccgcggggcgtggggtgaggcggcgtggtcggggtcggcagggtcctgagggtatcagggagcccccttcgggcagaagcccgaggcccaggcctggcccgggaggacgggcgggtggccgctgagaagagcgggggcggcggagaggagtggaaccgaggaatgtggcgtgtgcggggtatggaggaggagcggcggggagctctggacgagcggtgcggtagacgggagcggggacggaacaccggccgggacacccgagtgaggttgggagtgcgaggcagggcagccctgcggggggtggcagggctgtgctggccggggactcggctgggagaggagccgcggctgctcgcttgcaagtaggccttgcaggttggtggggacagagggtttgggggagactcggcggcgtaagaggggaggagaggcggtccagtttcggggttctcttccgggccttctgagggggggagtccctattgtttcccactcgcagagctggttccggctcttgtggcgcagataggattgcagggcagaaacccttttgctttttgatccgagggagctgggtttgaagcgagggaagttgggggagggggcgaggaattattgccttacggttaccggactccgattcttggcttagggttttcccttcgccatagcccccctttaccttcgtaagaaccccaatcactcctacttcctgttgaggcgtatagaaatcgccctgtatttgcaaacaaaagcccttgttggagcttatgggactgttttaggtgtgaaaactgtcaattgctaaccacggtctgggccctgctgtaattaactctgccaggggctcctcccaactaagtcttatgttccttcgtggttttgttttaggaatataacttgcaaatctaaattgggaaggggtaggacgaaaaatttcccactgagccataaagctgcagtgcaggtatccgtttctggagggagcagttatcgaagtctctgggtttaaggcgctaggaggttttactgtgcttgattgacagtactgatggtgtcggttaggattcagaggttgcccccttcatcctcttagtgctgtacaaacagtaagccttcctgtttgacggacctgatactgttgatcgtatgctgtcaatacagaaaatacctattgagataacaaataaacaatttaatgtgatagaagcatttgtgagcaagttgatgtatttaacttgagatatcttttgacttctaaattatggatttgggatacttggtttgaggcaaagataaccagtactaattaagctagtgtttcgggtgccagtgaaatgtaagggggttacaaaataaaactgaaggagttggacttatacttacaagtccttagtaatattttatttaccaaattttgagaattccatttggggaacaatttaaagtagaggaggttgaccaactctttcttaaaataactgttaattagacgctgtattctaggtgatttgggagaattttattaaacctgtaagtttaactctctggtatttctttcccccttaactacaggactccccgcccccacctttgaactttattttgaaaagtgttgtattaaaaggcagcactaacagctttcaacttttttttttttgaaaagtcttctcattttaaggtttttggtttctgtcagaaatagaaaaaaagttaataacttgtcttggtcaaatctagatgtacattaagtaaattgagtgatatttcaagtcttaatgcaattaaacgtaatgacttttaaaggtggcaggacttcgaattcatcaggggcgattggagaacagattgttatttgagagtgaatttgaattttatcaatagtatctttctgcctcactttctctaagtttctttgatcttggaattttaaatgtttgaggttagatttttttttttttttttttttttttttgtagattgggttttttaaggcagttcttcgatgtgtctttcttatctcaagtagtgatttggcctgagtgtggctgttagtggttctctagaaggtgagcattctaaaggagctctttaaaagggaacaattttcccccaactttgttgtctgctaatttaattttttctttgtttcagattgaagtgagtgaattcagatataattcaagcttgttagagggctttaaaaaaaaaagttgattcggtgcatgaaagcaagttaactactgctgctcaccgttgagagacttacaggtgcttgcctgaactgcaataaaggactcatattattgagcaggacttatttatctcttcattttggagagcctcataaactgttattacagtttctctactgactttgaaaagtttgaagtttggaagagacacctgtgcagctaacaaagcatgagcacggccagaacagagaaccctgttatcatgggtctgtccagtcagaacggccagctgaggggccctgtgaaggccagtgctggccctggaggagggggcacacagccacagccacagctgaaccagttgaagaacaccagcacaatcaataatggcactccacagcaagcccagagcatggccgccactattaagtaagtggaagaagaccttggggacccgcagtttctggttatttctgttgttgactactttatgccttacattaactgttttgattgcagttggaggatagatcattttgtcatggcccagtaggtatttgtaatcaagtagtgtgtgacctgccattgtaatcgacccagcaaataaggaacatagacgtctataaattagtgtgttaagaaataaatgtgctggtgttagttcagtgtagaaggtaataccaggttctgcgaataaaattatcccattctgtttgcttttgagcaggcttacttggtagccaaagctgacctggaacctgtggcaatcttcctgtttaaatctacaaagtactaaggttacacctgtgagccaccacctccgacacgtttgtttgtttgtttgttttttgcttctagtgttaccactgcaacttaccctggttttcacaacagttaaggatcacttgaaattttgaaaaagaaattttacttaaaatttttttaaaggttttatgtgtctgggcatttcacctgtatgtgtgtttctttactatatgcatgtctggtgttcataaaggccagaagagtttgttgaagccactgagcttatgttataaatgatggggagtcttttagtgggtgctgggaattgaacctgggccagcgttcttaaccaataaaccatttctccagccttccctgtaaaggaaagtgtaaagattcaaacgttaagacaggctctccaggctgtggtggtgcgtgccctggtttccagtctcagggaggcagaggcaggtggatccaggacagccaaggctacacagagaaaccctgtctgaactttatttccttctaccccaagacagacagaggctctttttttttttgttttgttttgttttgtttttgttttttgagacagggtttcagggcttctctgtgtagtcctctgtataccaggctggccttgaactcacagagattggactccctggtgttggactaaaggtgtgccttaggggctcattttgtaaccctggctgctggcctggaactaggtgtgtaaagcaggctggctttgaacttctttgtggctaagaatggtctcagacttttgagtactagaatataggtatataccactcactatacccacttaacaagccttctgagctccaaggatactcactcacacttcacccataccttgttttgtttatagaattgacttttcagccaggtgtggtgactaggattggaagattgcctggagttatacagtgtgtataaggcctagaatgttttacatagtaaggcattatgtcagcccagtccttctgccaagaaaatgtttctcctctgaggatatatacaaaatcatagaaatttagaattttgaattcttgggaatgtggttttttatttgaggaagtcttaaatatgttagacttaaaattctagagctgtcatcttattgtatttgggtgttttacttgttcattttgtttgtttttgagataaggtcttgctatgaagaagttcagcttagccttgagctgtgtgacccaaactggccttaaacttgtgatccatttatctcgagacctctcaggtggtgagatttgtagccttatctcacaacagaatattttttaaagcagaatttgtaggttaccatctttaagtgcttgggtattagtggcccgtgtcttcaatcacagcactggggaggtagaggcaggtggatctctgttggaggacactcaaggtgacacagagaaactcaaaaagaaagaaactgttgccaggctgtggtggcccatgcctttaaacccaacacttgggaagcagaggcaggtagatttttgagtacagcctggtctagggctacacagagaaaccctgtctcaaaaaaaaaaaaaaaaaaaagatagaaaatgtcactctaaagattgatttataaagaattaacatcaaaaactttacccccatggaagttgggcttctattaaaaataaagactttcataaaatgatttagcatttaccaatcttgttatttgtttttttttttttttttagatggggtctttgtagcactcccctggttgaatgttgggattataggtgtgtgtcgtcattctgagtttgagctgcattagagttttgtaacctggacttttctaggcaaaacttgtcttccctgggtgctagaatgtatagattattgctatgccatttagtattaatctctaagagttcccacttttttgttgttaatgttttgagacaggaccaacacactattaatcctggctaacctggaaccatatatgaagaccaggttggtcttagcctacctgcctgcctgtgcctcccatttgctagtattagaagcatagtgggattggttttaactaatatagaaatgaagaatactttctaagttgtagtttcttttaacactgacaaataggcaagcaaaatttaggctcctttcattcccaaaggcagatatttcattatgaaagtgttgttcagttagaatttttgatttgagatatagtttttcttctgggattagtggtttctttccagttctgttgtctttttctgcaccttagtgtgttgtctctttgaagcagtctgaattttttcagctgttttagaactcaatacatctctctattgcctattttctcacttagatttttcttttcttttctttttgttttatttttgaggagcgatcttttattgggggagggttcatcaatcctccttggccgccgccttcctcatggctgccagcacgtcgctcagctcctccagctctctcttggcgcagatgtgcgtgcccatcctcttcttgatgaacttgagtacgcacttgtccttggacactttgagcaactccatggcgcgccactcgctcgaagggtgcggagccgcacacctcccggatcatgtccacaggaacttggcgtgcttggtgaggcgcccgcgtcgccggctgtgtgtcggcttgctgatgtttttttctcaccttgtggcccttgttgaggcccacggtcatgaggtagcgcagagccatggcttgctgctctccgatggggacaggaagagtagatttttcatttttaagattttaatgattggggggctggaaaggtggctcagtggtaaggagtactggctgctctttgagaggatctgggttcaattcccaacacccacatggcagctcactactgtctgtaactccacttcagtggatctgacaccatcacatagacacatgcagacaaaacaccattgcacataaaaataagtgtttttaaaaaagatatagttggccgggcgcggtggtggtgcacacctttaatcccagcacttgggaggcagaggcaggcggatttctgagttcgaggccagcctggtctacagagtgagttccaggacagccaggactacacagagaaaccctgtctcaaaaaaacaaaaaacaacaaaaaaataagtttaatttgtggatcagtttttgtactacatgttatgtattatgcattgttcaatttgacagtggcaagctgttttactaggttgttatctactcttatttaaataaaagaaagaaaggtacctgtgttagaatgtttgcactttatatgcaggctctagctttagataatcaagcttctgccagagagtttccaggtgaaatgactgagatggtcttattttgaatctttttttttttttaaagatttatttatctattatatgtaagtacattgtagctgtcttcagacactccagaagagggattcagatctcgttacggatggttgtgagccaccatgtggttgctgggatttgaactctggaccttcggaagagcagtcgggtgctctaacctactgagccatctcaccagcccgagatggtcttattttgttaagcatagtactaactgcttttcaaaattacctttttgctttttgagacatcacttcatgtaaacaggactggcctcccaagaggctgtgtagccaagggtaaccttcaacttctaaaccttctacctcccaagtgctggaattatctgatgcgtgccattgggctacctttatatagattattgatgaaattattagacacccagtttgtatttgagagaatagaggtttgggggagtaattggaacaacatcacagaaggaataggaatcaaatggagaaacttcaggtctttgtgtgcgtttgtgtttggagtcaaggtctttttgttcagatgagcctggggcttccaggctcaggctgtctttctgcctcgttctcgtaggtagctaagactacagatactcttggttctaacaagaattgtttagttactgtaagttacagccttggttgactatagggtactgcgccaaactagaaggtacttactgttgaaagggatcacctgttgattttaagttctggttactaggtagtctactggaaactccctagtttgtccagtgacctgagttcagtttcttagcattaccaaaaaaaagggaaaaaaatgtagttactaaggtttaccacactgttactgtactagaatttgaaacattatgtgtctccctgaagtgctgtggattgaatttagcagtttgtttgttttttttaaatccagaatctgagtctttttttttttttttttaagatttattttttatttattatatacactatagctgtcttcagacacaccagagagggcatcggatcacattacagatggttgtgagttaccatgtaattgctgagaattgaactcagaacctttcgaaaagcagtcagtgctcttaacccctgagccatctctccagccccagaatcggagtctttacatgaaatttaggtgttaaatgtttgctgctaaaaaaaaaatgaaaactatatggatgaaataaaacatgttttgacaaacacttggctcctccagcccttgtgttaagtctttatcgtccttaatgatttctcaagaacacgtccctgaagttgatgcccttgttagttgtgttgagtgcctgagtacattaaacactgtgttagagggatggtaatagttgagatgtttcctttgcgttgttaaagaggaagctatgaattgtgataacttcacgtttactatgttctctctagacctggtgatgactggaaaaagacattaaaactccctccaaaggatctaagaatcaaaacttcggtaagttggggtatagatttcaaatggaagaactgaacaattaccagtaaagaattgtgtgaaatgacgctgcatgtgtcggcttttgttttattttgagataatatcttatatagtccagggttactacacactctaggttctccttccatagcctcattagtgctgggagtatagttaggtgtgtgctatcaggctagcacataggtttttatttttatttttttattttttttagaaacattttcttttacagatttatttatttattacatgtaagtacactgtagctgtcttcagacactccagaagagggagtcagatctcattacgggtggttgtgagccaccatgtggttgctgggatttgaactttggacctttggaaaagcagtcaggtgctcttacccactgagccatctcaccagcccaggtttttatttttgagcagatagggtttcactatttagctgaggctctgtgtgttgaaatagttgaaactgtatagttaatagatactgggttgccaaaattttactaacagtctttggtgggattacatagtaggggtaacatattaagtaatgtgtgtgtgtgcatgcatatcttggttattttgttttctttttccagacagggttttcctgtgtagccctggttgtcctgaaactagctctgtagaccaggctgacttggaacacacagagatccacctgcctctctgcctctgccttcagcctagctgcatatcataaccttattttctcaatttttctcagcctttcagggagatatacaggctaggtattataactactatgtatgagtatgtaagaacagaagttcttttatttcaatatcctcaaccaagggtgacttttttttcctttttttttggtgaccaagggaacattaaataatagctagagatccttatagagtagcctcaaatcagtgatctgaccacagatgtcaaagcagtgtgcttgagaaacctgaacgtcgcagagatgttggtagctgtgagtggggagaactcgggcttgattttacatcttgtaactaattgaatgttatttatgtagaaatactctaactagactatggtcatatgtggttttgcctaaagttccatttttaaagtagtgtttatttgttgaaggtagagtagttattcctcagggcagtttaaatagggattaaagcagtagtagtaaagtgtgtgtttagactgaagtggggaaagagctcagcctgtcagggtgctttttaagcacgctaactgtaaaagaaccttgaatgtgttttgtttgattaggatgtgacctccacaaaaggaaatgagtttgaagattactgtttgaaacgagagttgctaatgggaatttttgaaatgggctgggaaaaaccatctcctatccaggtatgttcatcctttttgttatatgaaggttatgtatcatgcattatacacttcaaacattttaaaaaatacagctgggtgtggtggcatatacctttaatcccagaactcagggggtgatgccaggcagatttctgtgagttcaaggccagcctggtctacagagtaagttccgggacagttaggaccacagagatcctgtcttagaaaacaaaactaaattaattaggtaataatgaatttcacatgtatggggtgttttatctgcttatatgtctggtatcaagcaagaagaggacctcagagactctggaactagagttaggagccatagtgtaacatggtaacgtgtccttgtgtgtgtgtgtgtgtgtgtgtgtgtgtgtgtgtgtgtgtgtgtgtgtgtgagagagagagagagagagagagagacagacagacagacagacagatagacagacagacagacagggtttgctctaatccacactagccttggatttgaactgtagtcgaaagtggtctttgagctcttgcctcgccctcccaaacctagaattataggcaaacgtcaccattccaccgttcttcttgaacttttaaaggctaagtcacagaatccatccctttacttatgagtctcttggtgtttatttcccaagaataggggttatgtgtctgtagggttctttattgtcattggttgatggtttcaatatttctttttttatatttaaaattttatttttatgtgattgttttgcctgcgtgtatgttcatgtaccacatgtgttcggtgcctgaggaggccaggcaaggatgttggatcccttggaactggaatcttaagtggtcttgtactgccatgcggattctgagaatcaaacttgaactctctggaaaagtagccagtgtttttgactgctgagccatctgttcagctcctggattttattttaacattttgtggatgtgcagaggtcagacacgtacaggagtcagttctctttctactgtagattctggggaacagactcagggtgttgtacttttatctaccaagccatctaactggccctgttgttttttgagacagggtctcatgtttcccagctggcctcaaactctttgtatctaaaggtgaccttaaacttgtaacccttgtgtagaattgtgctgggattacaggcctgtaaagtcttgtctggtttatatagtgctggatggagatggaagtcagggttttgtgcctgccaggagaatactctaccaattgagctacgtctccaggctcttccatttattttttgaaacagacatttctgatgaatccttgtgatttggcttaagtcatgttttctcagcaaaatactgcaaagcagatttctctaggtattgagtttgaagatacatatagcctgtctggtgacgtcattaatttggattctcttgttgcaatccaagttttgtctgatgttttcctccataatgtatggcgtctactactttttgcccctcttaaagctaatcttaacattctagagaagatttaaaaccaagtaagtagcctctgtctgtcaagctttactggttattatgataatctcctaattaccatctttagtcttccttgattccattggtctgggttatagtgagtttcagcttaattggtcctttcatatttggtccttgtaaagaggaacctgcccttgtatgtaaaaaaaagtagcaacaaagtagcaacagaaataattttttgattgggagtcaccacaactttttttttcttttggttttttgagacagggtttctctgtgtatccctggctgtcctggaactcactctgtagaccaggctggcctcgaactcagaaatctgcctgcctctgcctcccaagtgctgggaccaaaggtgtgcaccaccatgcccggcggatcaccacaacttaaggcactgtattaaagggtcatagcattagaaaggttgagagccactgttctaaggaaatacagctagtgattccccaaaggtgaggaaggaagtgaagtgttttgttcttgttttgacccagtctcactgtatatttctgtctgtcctggaaatcactctgtaaaccaggctggctatagagaaccaactgcttctgcctccccagtactggaattaaaacagtagactaccacacctgcctctgtgtgtgtgtgtgtgtgtgtgtgtgtgtgtgtgtgtgtgtgtgtgtgtgtggtgtttttaaacaaaaggggccttgtttacctctggctggctttgagttccctgtgtagctgagaatgaccttaaacctcacacctaattcatgcagtactgagcatcagacctatgaaaagcataaaatagtgattcttagaatcactcaagagtctagatccaaaaagagatttacaatttacctggaacaaaatgagcctcagcataggctgccctccgctcttattcttcgggcagaattttgctatgtagctaagctgactcgcaactctaaaaatcttctggccttaacctccccaagtgctagaattgtagacatgggccagcaaacctgccttttatctacttaccttctctccttatcccttctcttttcttggcttttcaacacagggtttcctctatgtaaccctggctatactagaacttgctgtgtaaaccaagctagcttcaaactcagatctgtctgctttctgctaggattaaaagtatgagacactgcctagctgtttgttacccattttcttaaaaatgatccatcatctttttcagtatttaaaactacagggtttttgtttgttatgtgtttgcccttatgtccacaagtgcaccatgtgtgtgcctggtgctggctgaggcagtaagaggcccctgcatcccctggaactggagttatagacagctagttggaaggtgccattgggtgctgggaattaagtctagtcgctctagaggagctcttagccactgagctgtctccagccctgagattatagcttgaaaggacatgattttttagatttttttaattgtgtgtgttttgcctgcaccatgtgcaggcctgttcctggaagagatctgaagagagtgtccaatctaggattagagagatatataaattctgagaactgaacctgggtcttctgcaggtactcttaactgctaagcaatttaatggatattaagaaaaaaattaaagccttcttgattagatgtttaagctgtacacatttgaattgtgtgtgttttgttgctggttttttactattgttgtttcatgtgtgtttgtgtttgcagatagggccttactttgtagctcatgctagcctggaactcactctatagcccaggttgtccttgaagttgcagcaatcctcctggctcagcttcccaagtactgggttacaggtatgagttttcagttctcagctgaactttgagtggtgtgtgtatgtatatggcagggtagaggatgacctcaggtggtgttatcagtcaccagtcactacagagcctagactgaatctcaggggtctgtttgtctttgtttcccaaaggttgggatttcacacccctgctgtcatgactggcttttttttaacctcagtgctgggaatcaaattcaagttgtggtgctattgaagcaagaacagtgccaaatgagctatttctctcgccctgagcaacttctgagaggtgatatttagttgtgatttggttgttagcttattggaaaatgaggcatatgaaattgctttctcaaaagaggttttacagcgacaacttggaactagacacaaccaattgtgcctgtacgtctctccagatgtagccatctgtattgggtactcggtgagagtgacttcattctaaaggtagcgtgtagcatgtactccttgggaggcggggagggcgggcctgggaatcttcttttctctagtaaccattgtactaactttggattctgtttgtgaggtggcagctctattttttttttcagatttatttatttattttgtgtatatgagtatactgtagctgtcttcagacacaccagaagagggcatcagatcccattacagatggttgtgagccaccatgtggttgctgggaattgaatttttaagacctctgcttgctccggttagccctgcttactttggtcaactccgcttgctctgccccaaagatttatttattattatacataagtacactgtagctgtcttcatacacatcagaagagggcatcagatcccattacacatggttgtgagccaccatatggttgctgggaattgaacctgggtcctttggaagacagacagtgctcttaaccgctgagccatctctccagcccctggagtgacaactctttcatgttgagttatgtgaggatcagaggacagttttgggtgtcagtccttgccttttgctttgaggcaggggatctctctcctgtggctttcccaatctctaattgctgtgtgtgctaggctagctggatcttgaggactctgtctccacccccatctcaccattgagttctgagattacagatacagactctgatgcctggcttagcttctgtgggtctggggattcagactcaggtcctcctgcttgctcacattaggtggctatgtacttgctcacattaggtggctatgtactgttactaaccaaccacactccctccctgaacccacagtgaaatcaccacaggaaaaataaggtagttttattcttttaattttgacgtccaggatgaccccaaactcaagatgatctttgtacttcagacttccaagtgccgaaattaaagagtgccactaacccagggtctcaccatctcacagagatcttaaagataatgtatcaccatgctgttcccccaccccacccccaccgcccccttgagagtgaattgtttcttagcctttatcaacaagtatgaggagtcctgccttttacagtatattatgctaaatgatagctaacatatttttaaaatttcatttgttactctgtgagcgtgtggctaccatgacacacacatggaggtcgaaggacaggttttaggaatttcatgtggttaagccaataggcaagcacttttacgtacgctaggctatgcttgtcttactggtcattgtgtttctttttaatctttctggttttgacttctaaagttttgtgtgtgtgtgagtgggtatgtgtgagagggggagggagagaagtggggggaagacacaggttgcatgctctccaaggtacacatggagatgaaagcacgttttagatatgggactaaattcaacagggttgcacttgcaaaacataaaaatctgttgagtcattttaccagcctccagtgatatttttaaccaacaaacaattgtgttttcagaaatacaccagtgatcaactataacttaagatattttttactttagtaataataaaaactttctgtgtttcagaaggaagagggggctcttcatttttattttgtgaagattttgaagaaaaacttaacatttaagaactatttctcacttttctgaattactcagaagagagcatctttttccatttggtttttttctatatctttcccatacatgctttccttaaaattttgggcttccccaacattctaggcttgcttatgctttctgagaagcctccctattcatcatgtggctgcctagcctctgtgtacctacctgccttacaaattccaaggccttttctcttctcctcccagcagttacggaagttcacaaacctaacaaaattgtcgttgagctaaaaaaaaaaaaaagtgtgtgtgtgtgtgtgtgtgtgtgtgtgtgtgtgtgtgttagttaaaggaaggggctggagtgtggctcagtaggatggatgcctgcttagcatccttgaagccctgggtttgatatctgtctagcaccagataaactgagcaatcacagcacttgggaaatggagacaaggaggatgagaatttcagggtcatctgtgtgagttaggaggccaactttggatacaagcaatccttggctctttccttccttcctaccaaaagtcaaatacagattattattctcaatagagataaataaaatgtatttggtataattagcaaattgttacagttgaccttttattcaaagatgatatgttgaatttggaactctaggaacagtgagccggctcaaaattctttgacttgcctgagcttttttaaatatgggggcagaaggtatgggtggttgtgtactcacctgcctgcccgtgtgtagatccacagcttcctcctttttcatggcatgcagggatgaggtcagcaggctatgcatgcagtaagtgctcttagccattttacctgccagttttctgagacttttcagtttaaaataagttctttatatactatatacttactctaggaattggttaggggtcaggggattgagaaggctaaaggctctgaaacaatatacagttttctaaaacattgtctttgagggagctggagagatggctcagcgaggaagagcaatgactactcttccagaggtgctgagttcaattcccagcaaccacatggagattcatagccatctgtaatgggatcttatgccctcttctggtgtgtctcaagacagtgacagtgtactcacataaaatgaataattaaatttttaaattaaaaccccaaaaacattgtctttgaaatatttcactgagcttgtcagctcatgatgggaaaggtagtgctgggtgggggggtgggggggtgggatcattttttttttttaagtccacaatgtatatgtctaagaataaccaaaaccttcagtactaatttgggggtcacaaataaattttagcaattagtattcacaaaggatgaactgtaattacagtaaattatttaacaatataaagcacctgtgtcaatcagtttcaactgtaagccaattaaagctactttttacaaaacagtaagattttttacagtgaaaataaagtcaaaaataaaattaaannnnnnnnnnnnnnnnnnnngggggggggagcaaatcaagagggttcctaagagtcttcgaccagcctgggctcaaactgacagagccatgacaaaacaaaccagaaagcactgagtgcttctcatgcttttaggttttgagatgaataagggagaaagaagcttgtgtgtgtgttgggggcaggaggggtgagtttctcctcaacttgaagggttggctctgtgcctgaatgtttagtgatggtgacagctagcagcagctgctcctccactactgttaagttgtcgctcctggagtttcatggccaaagctgtttgtctctgaagcacattgacgtggagccattatatgaagttttaggataaggaagtggtttgcatagttagctggactgtaatgtcaaatttgagagtggcagaacattgattttagtacttgatgtttgctttaaagtataaaattataaaggtttaatttcttttcagaattctaaaaccttgatttttatggggctgaagagaggtggcttatgattaacagctcatctgcttgccgagggcctgggttgggttcccagcacccacatctcagtggcacctaactcacttccagggattcttgacaccctcttttggctcctcctgtactgagagagcaagagagaaactgagacagagacagcgagcaagacagagacagacagacagacacacaaatatacatacacataagtatcttttttttttaatttctttattttacatacaccatgagcacactgtagctgtcttcagacacaccagaagagggcatcagatcccattacagatggttgtgagccaccatgtggttgctgggaattgaactcaggacctctggaagtgactggaagtgactactcttaactctgctgagcatctctccagccccgtaaatatctttttttaaaaaagcttatttttacacgcactctttccaaaccctgtttataaaagctaagaggtcattattgacaggtttgtgaacaggtttatttgtaggattttgtagctgaacaatgtacattctgtcttactttgcctatttccctttttaatttctatatgtgtacttatttccagtaacttggtagttattgtgtcccagataataagtattatttttgttgtggttattgaaaacacacatgataaagtaaacttaaaaatgaaaatgaaatgtcactttcagtgatgtgacaggtcctgtcttcagtgaaacatgattcaggacagagaagttgtgtgttgataaatactctggaagttgatgtaataaaaaataagtatcaactaggccccagagataagtgatttcagcttagttctatgtttctattttgtgtaagagaaagctcatctttttttctccccctctgggattttagggttttgttttgtttctgtattgggcattgaaccaaaggccttacagatgtctcagcatacactcaagtcagtgacttacacctccaaccccgtgtgcacatttttcatatggcatgattgactttgccagtctgaaaacagcgtgtgctgtcaactgacctggactcttggggctctcagagtccgaaccaccaaccaaagagcgtgcacagttggacttaggcctccccgaacataggtagcagatgtgcagctcagtcttcatgtgagttctgaaccacgggctggggtcaccccaaaagctgtggcctgtctgtgggctgtgttcttgtagctgtgctgccttgtctggcctcagtgggtgaggatgcacctagcctcacaaagatttgatgtgccagggtgggggagtacccaaggggactccccactcagaagaagggggagggccagtaagtgggatgtaaattgaataataataataataaatttaagaaagaaaatagcatgtgctatctaaactttccttggagttagtgccccttttttccctgttttcagacaggctcttacatttgtcaagctggtgtcgaactgctcatgcctactaggattgcaggaaggagctactatgtggctatttttatttctaacaaaaatgtcttgtttgaggactatttacaaccctttgagatttttttcccctcacatacgcacacttttgtttatttgagacgggggtttttagtttagccctggctgccaagaccagactggccttgattcacactaatctacctgattaaaggtttgcatcaccacgccacacccgtctcactaccctttctgttgtgctgggatgagcctactattttttttctgttaacagttttagcaaacttttggttcaaagtggtgttaatactcactggtcctgttaacccacctgggtctttgccattcatgcagcgtacatagtgcacttcaaagcagtaccaaaaggctattctaaggtgtgacacagagaagaatctggtaatttttttattcacaagtaatttttgcatccttgtcttttaggaggagagcattcccattgctttatctggtagggatatcttagctagagcaaaaaatggaacaggcaaaagcggtgcctacctcatccccttacttgaaaggctggacctgaagaaggacaatattcaaggttagtggaataaagagggaggggtgggggcaggactgtctgtacttggagctttgtagcttttagtcttggtcagaattcatataatctactctcttagtatatttgccttaagtgtctaaaaattattttcaacttttaaagggaatttcccatcttcagagtactttttttatgattgataaacagtttttaaaatgctcatgtgtgataagcaacgtaagtaaaagcaaactggtgagaggctgagccagccattgctcacagctgtgcagccaaactccccgtgggagccatgtaagcagagcccgtgtagaaacagtaaatgcttctggttgtagaggcttgagtttatcacattgtaagagcttagacagtagaaaagaagtaaatttctatagttgtatctggagtcaattcatataattaagatttcacctctaaagcattccttaaattgcccaagtttcaatttatagttctctctcctgtcgttgatgcaactagaacctgaataggatgcatttgctacttaagtatttagattagtgactcttatgtcaagcaaatgtagtttttaagactgttatattaatgtttatgttatgcctgtgtgtttagacatactgcctcagtgaaactatttttatagcttcttaaatttctaaaagatggtgtgttcttattctctcttctcccgctcctttgttctttgctattttctagcaatggtgattgttcccactagagaacttgctctacaggtcagtcagatttgcatccaggtcagcaaacacatgggaggggccaaagtgatggcaaccaccggaggaaccaatttacgagatgacataatgaggcttgatgatacaggtaggaaatgaggcaggcagcagggctgtctgattatagctacaaatgtctcgtttatttttcagacttattcgtgattatgtggaggtggggtgtggctatgcacatgtgtgtgcaggaggtgcctatgtttgtgtatgggggggggcagtggatcccctggttctagaattagtagctactgccaattgaacttgaattctttacaggagcaatatgagctcttaaccactaagccacctctccagtctctaagggtttccttttaggaaataactaaaactttgttggttgttttgttttgttgagacagggtttctctgtgtagccctggctgtcctcaaacttaatttgtgaactaggcaggcttcaaattcagagatttaccggcctctgcctcccagttacttttataaaaagcatatgctaccactgtctggccctaaaatacgtctttaattaactaagggactgagggtggattagtaggtaaattgcttgcatagcacatacaaagccttgattatttccccaccaaacaaattggagttagtgacacacacctataattccagcactggggaagtgaaagttagaggatcaaaagtcaaggttatcctcgcctacataatgagttcaaggccagcctgtggcacatgataaccctgttttaacaaaataaggaatcaaaagaacagaaacactgtggtagaaaatgaagagtaaaatcaaccatttctttcttttaagaggaaaaaaagataactaaaaggttattcagccttattagtagttttggtttttgttttccttgacaaggtctctctatgtagaccaggctgtcctcaaacctccaactcacagagacctctctgcctctgcctctggaattctgggattattttttagtattgtttaatgtagttcagagtaccatatttatattaactgttctaaatttcaaggcaaaaaagtattagttatgagtgatggatatttgtggaaagtaggctgttttataacataagtgtacaatatatatgacagtatatttcaggttataaacttagattttcaagtactttgataaatataaaattgtatatatgcaaagttgtttactctgaaaaagaaggcaaatttaaatatttcaggagattggttagattcagtgagcctgaatggagtttcacagtcagtaaagatttacgtattgagtttttatgaagggctgttcactgtataatgctgggtgaagaacagtaacaaaatagcaagagtcaggttttactcagaatgttaatatatattagtatttggttatttagctatattttttaacttgcacaatttttggtttagtgatcagtctttttttccccttaaaacagtctgagcagcattgcccagattgaagacatgtcttttgtatgcgaaaccctgtattctggctggtaattacttttttttttttttttttttttttttttttttttttatgtttttaaacacattttattttatacactgtagtggttaatattgactattaacgtgactggatccagaatcacccaaagacaaagcccagggaatgtctgtgaggaaggttctagaatgagttgaggcaggaagaccttctctgaatgtaggtggcactgcttcatgagcttggggtcctggatgaagaaggcaggtttagctgatctcagtaggagcagtctctgtatgggagtagtcttcaggctgtaaatacccaagagtcacgaacagacgaccatcttgatgtaaaagcatgaggtagtttaatgacggagctctgggccgacacgtatctctcgcaggagacagaggtgtcgaccacatggtggagccataatggcggagctccagttcgaaacgtatctcacacaggagacagtggtttcgaccctggctgttatttcttgcagattgtcataagataaaagttgtatgcctttagttggaattagtaatttgggaaattagcccatttattgaagagttgaaacaagtattgtctacctgctgtaagaagagatgaaaatatacagcccaaaatacatctttgtaccttttggtattaatttgtacctctataaatattatctatgatgctaaatatatactataaagttacaagttttttttttttccgtcctaggtaaaattaacaagagagtatatattttctgaatcttttttatttttccctgtaaatctttgtagtgcatgtggtgatcgctacccctggcaggatcctggatctcatcaagaaaggcgtggcaaaggttgaccatgtccagatgatagtgctagatgaggtaatgttcctgactgtcctcctctgagctcagctcacaccctgtcctggatacgtgtgattagaaataaccaagccaagttcgttttatgtctttctattcagtgttaacattttaaaagcatgtaagctaagctaagatagttcttaaccctaccctttgttttacatctgcttctttatattgtttggttcatgtgtgtctgaaatttgttacttccttaggttataacctaatatgaattccttttaagaaattactcgactgaagccaaatgttttacctgggaggtagagtcagatgtctgtcttgaatttgaggactgcatagtaagtttcaggccagtcaggactacaaagtgagactctgtcttaaaaataaaaaactactcctctgtgtctctcgggtgtagcagtgctatatgcatttagtgtgtcactattagtgttttggtatacagctattttccttttctgttttgttttagattactagtttctggcttttcactaatgaggaataacactgactattatatattgagtacataatgtgatatttagtctgataagatataggttgttatgggagtgtggataacctgtgtccatagttgaggacattgaaacatggctaagtggtacccagtacagctaacgagtaaaacatttcagcccaaatggccttggatttatcgtcctgtttcttctaccttctgagagtaaggtttatgccaaccacatctagctcaaaacacatttttgaccaatatactctattatctctttaatggggatcacatttaaattctgtcaaagaaaaggattttgacagtctacatatttttttccttagggattatagcctctgctttaagacagattcataatgtagcccaggctgacctcagcttctcacttctctcccaggtcagccactcaggtgctgagcttacaggcatatgctaccacgctaggctcctcccccttatgcactgctaggggttgtcctggtaacattgtctacattagagtcttagggttatagccaggagaagcctgtgtgtaggttgtgcattgccctttgcttatattgctctccaaaacttttaatgccttattcttttttaaaagtaactttttttttgtattacaggcagataaattgttgtcacaggattttgtgcagataatggaggatattattctcacactacctaaaaataggcagattttactatactccgctactttccctcttagtgtacaaaagtttatggtgagtattagctctgtacctggcatcagtgctgtcatggtactgagtgtgcttttacctgtaattacattgtattatcagaatatatgttattgcaaggtttcggatttgttttttttaatatggtcaataagatttgggcatggatttagttttttgagacagggtctcactgtgtagccctggccagtatgctagcttcaaattcacagaggtctctgtctcccaagtactgggattaaaaatatgtatgtgcactttttttttttttaacttaaatgacctctacttgttctgaggctagcctggtttacatgagttccatgccatctgtccatccgtctgtcagttggtctgtttttctcttttttttcttggttttgatttttggagacagttttgggggtttttttgtttgtttgtttttgtttttgttttttttccgagacagggattctctctatagctttggctgtcctgaaactcactctgtagaccagactggcctggaactcagaaatctgcctgcttctgcctcccttggagacagtttctatgtgtagtgctggctggccatgagaccctgcttcaaaatgagaggagttgtgattttttttttttaactctgtgccaaggtgacatatcccatcgtaagttggttatagctcatctctgtgaggtgcatttgaatctgaggtctaccattttagtataacttattttatgaatacttggttttgaaaagagattcatcctttagagcaagagacaaaataaaaaaccaaaaaaaaaaggtataaacttggggcaagaaatgggagctcttgccttagcatgcctgaaagtctttacttaatgactgtgttccctcccactccagaattcccatctgcaaaaaccctacgagataaacctgatggaggaactaactctgaaaggagtaactcagtactacgcatatgtaacggagcgccaaaaagtgcactgcctcaatacacttttctccagggtaagtagtgggcttttgtgctgagtcctgtccttcactaattcctagcaagttggacaattagatcattttccctttcctttcctttcctttcctttcctttcctttcctttcctttcctttcctttcctttcctttcctttccattcctcttctctttttttctttctttctctttctttctttctttctttctttctttctctttctctctctctctctttctctctttttaattttatttttgactttattttcactgtaaaaaatcttactgttttgtaaaaagtagctttaattggcttacagttgaaactgattgacacaggtgctttatattgttaaataatttactgtaattacagttcatcctttgtgaatactaattgctaaaatttatttgtgacccccaaattagtactgaaggttttggttattcttagacatatacattgtggacttaaaaaaaaaaaatgatcccagctaaggtccaagaagaggacagacattctgtcttcttgttttacttataaatgctacaattgtttttcaaattttggtgctgttcatcattcattccaaaatgacggcctcgctgctgccgacgtgcttacctgtgttctgaagcacagggggactgatgtgtactacacagggaaaacatgtactgggtaaacctcctgcaggcacgggttatattggttaggactatagacatactaaataagacatgctcaaagaaaacacataaattggcatgtttaccaatttataaaatgtcaccagaggctcacaagtacttgtcattttctctagaaacagtgttgttttaacttgtttgttttctttattttaatgagtctgtgtctgtgtggggttgtacgcatatgagtgcagtttctggaagcatccagaaaagggtgttagagcgcccgaaggagagttacaggtagttggggcccacactgtgtgaactgaactgaacttgggtcttgttgaataacagtgtgtgctattcactgcagagccatctctgtagcctcaaagcagtggttcttatttgctgagtcagtgttagcagcggtgtattgtaggacattactgtgttgtctctgcaagttaggtggcccttatgagataatcttctctaggtcgacaaattttcatctgaaagcttggctagatattttcatgattggataaacagatgcttctgtctttctcatctttctcatcttctgtgcttagcttcagataaaccagtccatcattttctgcaactcctcccagagagtcgagctactcgccaagaagatttctcagctgggctactcttgcttttatatccatgctaaaatgaggcaggtaaggataatttcgagaacttgcatagatttaataaagaaatattttcctaagtatttcttatattttcttttgttataatgttgtataaatgccttgtgtgtgagagtaaactgttgtcttaaggtaggtactgctgtattagtggtagagcagtgttccagaaaaagaacaaatgaacggactatttagtagacaaagagaccttcacttaaaccaataggtttaaaaagcagtccagaaatgtcagatcttggggctggagagatggctcagtggttaagagcactgactgttcttcagaaggtcctgagttcaaatcccagcaaccacatggtggctcacaaccatctgtagtgagatctgacgccctcttctggtgtgtctaaagacagctacggtgtacttagacattattattaataataatagtaataataataataaatctttaaaaaaaagaaatgtcagattgtccatgaagtcctagcatttaaagtaagtgaaaagctcagagtcattatctgttccatactaagtttgaaatcagcctgagtgacatgaaatcctgtggggagggaagggcacaggagacattcttttggggggaatttctaaatttgttctgtttagtgcaataactttattacatagctccatgtacccattagactaggtaaaagcaaatacaattgaaaggtttgttacttagtcaaatccctgaggctggtgactccattattggagaataccagtgcaattttttttttttttttttttacagaatgcactgctctagattttaatatacagtaactcctccttacaaaggagagttctgagatcccatatcggatacctaaaatcatagacagtaccagattgtatgtgcatgcttgctatgatgcagtttatacattggatatggtaaaacgttcactaggataataaaatagaataaatatgacactatatttgtcataaatgttacatgactatgatcgcagcatggcttattatgcctgtcctttttgatagaatgcttgtatgatggaatgaagtgtatcatacagacattgagtgatacagctctagactgctacagaagcataggtagttgtgtaaacaaatttggggttgaagaactgattgggtaagagaaaccatgatgaaaattttgagttgtctataaattttactcagtttttatatatccccctaccctccaggaacatcgaaatcgtgtctttcatgatttccgaaatggcttatgccgcaatcttgtttgcactggtaagtgtttttgtatttcttggacctactgttttcttaattggctggttggtttttttgttgttgttgttgttggtttttttgtcacatagtgaaacctatgtgacagctccttacaccctgctgccactttgacagcttctgaagacaggggtgcctgctgtttagttcctaggttgagagcaggtgctattcagtgcctgaccttgggttcctcctagtgctcatgctgcacacgtggctctaaattaggttttgcatttatgtgctttctgaacagttctaacatacaaggtgagcaaacacaaaataaactttactcgaaattacattttagaagttgtgtctatttgatttttttttttcccagaatcacattattctataccgtaagccaagattttctaatttttggttgttctattactacagaaaaataagcctgggtagggagggggagacacaaatttagctcagaaactaatagaatggtgccttcgcacctatgtacttagaatttaatcttactattagtgtgagaagaagaatcatttgaggaagtagaaggacttggagtttgaactataatgtatatattggtaaattgctcatctttatttttcatgtgaattttcacatacgcatgtacctatacattcagataaaattgtatttaagaagttttggttggctggttggttttgtttgtttttgagacaggatactactatatagctcttactggcctggaaattggatatgtagagcagactggtcttaagctcacttcttttgttagctggccttggccgcttaagtgctgagattagaggtgtgcagcaccacacctgacacaattatatacataatatatatatacattaaaagatttattttaatttgtgtctgtgtctattctgtgtctaccacgcttgcacaacaggtgcctgcggaggccagaagagggcattgtatcccctggaactggagttctcaggcagttgtgagcctgttgatatgggtgctggagatgaacgcacatcttctggaaagagcagcaagtgctcatgtccaaggagccatctctttagccacctattttaaaatatagtcaggatttttgggaaaatgcacataaacaaaacacttgttactgctaccagatattaaatttggttattcctagtaatcaggaagtaactgtaaaaataactttatggaggcagtcatattattgagtggttagctttttaaagttgtgtttaaatatttagctgtgtatagacattttttttttggacatttgggaaacctataaaatagcttactagtgaaagtaaagttgttagtcaaattgaatattcataagaaaattgagactcttgctatcaggcacctgcctccaactccatttttcaactttaaataaaaagttggcttaagagctgtaaattcaatcccaacattaaaagaagacagacattgatagtattactacactggttaattcgtttatttgtttgttgagtcagggtctcatgtaagccaggagagcctaaagttcagcttgggatggcctgcttcctcttctgagacaaaggattgtgggtactgatatgccaagctttacctgatcttggaatcctaggattgcctagggttagggttttatgcactgcactcattcaagattcttaatgtatatgtggaatgctttggtatataaaatcctacttgttagggtggctgacacagtttgaggctagcctgtgctacagattgagtccttgtctcaaaaaagcaaagtaatgagaaaatgccacttctccttcaaggaatgttaaattaattagaaagttggtattaaaacttgcgtaccatgtaatcttcattaaaagtacttgattttgccatctcagaatcagccttaagatggagtacaaatgaatgagcattaaaaataaaattgtaaaaaacaaaaaacaataacaaaactagttggtgccaggtgttgtgcaatcagcaagcacttggggtaggggcaagaaggtcacttcaggttcaagaccttcctgctctctgctagccagaggccagctagaactacagtgacctgtagtgaagatagttgagcttggttgacaagggagtaatgtaattattatcctagtggttattggaatacacaagaaatagctgtcaagtcgtttcagaagggacggggttttaattggctttatggactgggtaaatttgatgtggagaaaaaaagatttcaagtttgaagacttgggttaagaatagtgcataaaggtctacacagaacggcagtgtgtgctcctaatcctgacgtttgggggtttgacagaggaacacgagttcaagactagcttgggccaccagtgatccccacctcaaaaagaattcagtgtcgtgagtggttttggaaggttgttgtgagaaaggaaggaaccctgattatgaccctgttgtgagcgtgagggactttgcctattagtttacttagatgagttgtaaattgtttaccataagtggatggaggacttctaaaagcataattagtgaattacctttcaataatgaaaatcattacttgtttgtttgtttgtttgtttttttcagatctgtttacccgaggtattgatatacaagctgtgaatgtggtaataaactttgacttcccaaagctggcagagacctatcttcatcgtattggaagatcaggtaagtaagaatgggggtagcctcgcagacattgcttgatgagaaatacaatctttcatttttcctttgtgaagtaaagtataatagctgtgagagcagtgaaatcacatcaattgacttgtttgatatttaaaactaagtaatttttttattaatcatttatatttggagacggggtctggctacatacatagaaagcccaggttatactggaacttaaaatgtacctgcctcagtctcccaagaccttgtgtcatttattagagttaagcctgatagagcacctgaatccaatcctgatacttacgtaacaagagagaaacagctgtcaacacacacacacttttttttttttttttttggagacagggtttctttgtgctctggctgtcctagaactcactttgtagaccaggctggcctcaaactcagaaatccgcctgcctctgcctcccaagtgctgggattaaaggcgtgccccatcatcgcccggctaaattataaaactttttaaagaatgttctttaaaggtaagctgactgtatgtggtgtacacttgggaagaggaggcaggtgacatctgaacacctgtgtgttagaggccagctggggttacaaactgattttgaggccagcctcaaacaacatgattgagacccaatttcgggggttgggggagttaaagtaagctggaaatggtggcacataccctgtaatccttgtgtttgagagattgaggcaggaggatcatgattatagttggtaggggggttgggagaaatgggtttgctctcaaagagcctgtaaagccctctgtttgatttccagtacccacatcaggtaacataaaagcacttgtaactgcaccttgttaataacaaaaagttaagtcacatagtatctcacaagaagaaagaaggaaagaaagaggttaaagtaattactatatacttaaagtgaaacacaagaaaactggattgattgaatggtgtagtgtacaagtgtattgttcagtgtgtgtattttgacagtcgtacaaacgagtatccagtttgtcatttcaaaaccagaaaattaggtatagctgtccctcggggttcatgagcaatgggttccaggacccttgccaacatcaaagtctgggtagtctcttaaaagcatgtggtattagcatataactggtgtctatgttacactgtattgtttagggagtagttgtccagaagtctgctgcctgttcagtacagttgatgtgccaagagaaagacctaagttgttttgttttttatttgttcaatcttgtttgtgccattcagaatgccaccaaatgaatatattgctgctctgtgttttggcatattacagacttgttaatacatgttgctctcaaaacatgttagatagatacatacttttatatttgaatcactttatttaccacttaaactttttgccaattttaaactcattaagcacatttttctttaggtcgctttggtcatcttggcttagccatcaacttgatcacttatgatgatcgcttcaacctgaagagtattgaggagcagctggggacagagatcaaacccatcccaagcaacatcgacaagagcctgtatgtggcagaataccacagtgagcctgcagaagacgagaaaccgtaacaagcacgtatgtacctagtaacctgacagaaccttcaaggatttccaaaccctgcccagtgtgagcgagcgcctgcagtcgcagcactctggagactttgaattggggaaataacgtcagtagggccgcatagccctactattcagaacacaaaaggcttttctgtgatgcttctctttcacttaatttttatgtatttgtttttgagagcggctcaggcagccagagatgccttcaaactcttcatctactgtaggatagtcttgaaaacccaatgtccatgcttccactttcccagtgctggcattagagatgaaggccacacccatggcctcttagttgtgaatgaaggctgcctgcagtcagaacttggaacgtctcattctgtccttgggtatgtgggaaacttgtagtttagttgatttttctcagccagcctttagccctagctcaactgaaacagactggacttgcctgcacgagctgcaacagccaagtgaaatcttccatgtaactagtagatcaccttaggagaagagagagtttactgtaaggcttgtgaaaacatgtctccttttttatattgctttcatggatactaattttaaatttctaaacttttcccataggctttgacaaactacagaaggctctttggatctgtgacacatcattttgggggggtgctcttctctttgtgggttttttcatctttattttggaactatgaagagttatataagagctcagacatttttcttttttttaaactggtgaagaaaaactgaaaagaagacatagaccttttttgttccacttgtttgcactgtgtgctgactgaacattcgttgcactaactgctggtctttaaagatgttttctggggaaaggggacaaggaaggaggaaaagaaaagaaggggagaaaccctaaaaaagagaagaatttgggtgaacacgtgcacctgtctaaagttctccactagctgactctactgcatttcaacttctccctgattattcatccgtttttaagcctgaagagcttattacttatttgtgcgaagtgccttatgctacaagaccattaagaatatcatctttacacacagcccaaggaatcaacagagtcatgttctattttcttttttatttctttgcctcttcattttggtttcacgttgaagtctcacctcctgttctaccagtactcagcccagggccggaaggtggactagtgatggcagcgccattttccttttctttatatggaggagttgattcacaactgcagtccatccacactgtacatacatgtatttaaaaaaaaaaacaataccaagtaaaattttcttccgggctgagtagacgtaccatcgtcgctcccaaaggaaagagcagcctctcactgcaggagccagatgacaagcctctgtgctctacagcagaacactacgctggctcacacgcgtccatgagcaggaaggcactcgctgtaaagacttgtcggagggagccttgaccttctttcctctgtggcaaagcgtgacccgtagaaaattggatgtgtatacttgtataaactttgtaaataagttttttttctgggttcatatatatatatatatataaatatatatatatacatacatatatatatattattttttttggatgaaggttgctgggattaagggattagagtgattatgggagcagctaaagatgagaggggctcagttttctgcaacactaaattctaaaaagtgctttggcctctaactgtaggaagcagacctctgcaggctctgtgttggaaaggggccagaagcccggccacactgctcttgtaatgaatgcacaggcagcggtcttagcagacagcaaaggagctttgcaaggctgtggtccctgggggctttgagaagctctgtggtttggctctcctgtcctaaacgtttgaggaacttcccaagttctgcaaaggggaacaaagataaatcttccttggagtgtgagaagtgtacagagtgcagtcttagaggagagtgtgtggagcatggatttttatgtcaccggaccagccagtgcagcctcggcgggcttggcagttgtggagcctagttatccgcggcccctcctgttgtgtgtgagcagcgccctctgcctatcttgataaatacatttttgcaggaaggggcagcccgttagagctgttaacgtccatgtccatgctgcagaaagctgcttgctgcccgttctctgtgccgcactaagagttgctgtctgtcgttttgcattgtaaatcgctggcagatgccttaggtggtagtgttgctttaaactgtgcccctcccaacacgcttgatgtttggcctgatctccaggcaaaaggagggagatgaatcaaccagtgaactttttttttaaaaatgtttttaattcccttttaacccagtatactaggtcaggaggcatctagggaacaaaaaaagcaaaaaacaaaatttaaaaaaaattgattttcatattccatcactttgaagaccttaaaactatgacaaggtatgttgagtctgcttccatgcttaactcgtctgaagagaggagtcagttattcaaagttgctttgactttgcctagttctaaagcaaaactatttgtgacttatcccaaattctttggggatcaaaatcctacagatgcctccttatcagagataaccctgactctgtaacaactgtagcaggagctgcacggtacaaatccccaaaggcaagtccagtcaagtgttggctacaaaacaaaccaaattaataaggaagtcacttttttagggagggtgggagtggggtcttaaaaactcgttattttgaccaacagatcttgcccttgtaccgatgcagctctcctccttcctgcctttggcgagatgagggatcgctccgtagagcaacatgagcaggaaaggagtacaaatgcaatctgctgtctcgccagagggcaagtgggtgatcaacaaagtgcagtctcttgccaaccttggactgctctgccaggtgccacatgcctctgagtccctcttaaagcacagactccatgggggagtgttctgaagtacagcctctgctgagggtggcacttggacagctgggcacccaccccggagatcgctgtctgaagaggcggtgctggggtggtgcttagctcacttgagctgttgttaatgggaagatgccctactgaccaggtcaaaccctggttgggtttttttgttgtttttttttttttttatcctttttgatccctcttaataaggaatattgctactattggaaattgtctttcaggttctttccagtaatttttaaagtaatggttatgttttggttttcgccagtagttcatttcgataaaaactatgtcctatttttaatatccacctcaatgcttttagcctctggtcatgtagttgtgtaataagttacagactgttacacacttgctgctcagggcctgttttttctctcccttagtgttctgaacatgaaagaaactttcttaggaatggaatacatttaccataaaatgtttttcctggaaaggaaaacctaagtagctctaaattatttccaggtgggcaccagcatcataacaattggttggcccggtggggtggggtggggtgggctgggtgggtggttgtcatactcgttttcagaatgagatgagggcatctttccttggccacctgctttgtgctggacaccatcgtgctcggtgagaacagagcacagcacagagtttggagtgacatgttggaaacaaaacatctcattctgatcatttggtttattttttttttaataggggtgggaggggagggtactgtgtcccaaaagggagggtgtctgcactaaggatttagaaacactttggaagctcataacctcatgggaaactgcctttagccacacacactcctgacctttagatgagtaacaaaaagatgaaataagtttgtgggaattaagccatgttattttaattggatacttttttttttcaactctctgtgtatctttaaaattgttactgtggaatgattttcttgccaaataactttgtcaggcaaaattattggcctcatgggaggtgaagtaagccagattttgggtaaatttatgtggactttggtgagtttgtaattctactttatattcataaagatagttttttaaaactcccaaagcaaatctattttcttctctaatgtaaaaactcatctttggaataaagagttaagtgtccgagggttgtaacagatatgaggtcagagggagctagcctggcctggactctgcccctccacagctgacagactccaacagaagtgtatttaaatctccagtagacagagctgggcagggcaagggaggggtgggcctgggttagtaagctgcaggctgctgtattttaaccagtggttcttggggaggggtgctggagaatacaaagtcacttcccttttttgaaacaaaacaaattagaaaaaaaccaatttttttgtttagtaaaaataagaaaattctaatgtccctagtcacaagggaccagttccactttgagcagtaggaacttaaaaatttgaaaacatttggggaaagggaaaattggctttctgtttaattggcaaatgttccagtggggagggtctgtttttgttgggatgtgttacagtgtatgtacatgtctatggacctgagtctttaaggagttatatacatggttcattcagaaaagatggttggtaaaatcttgattgtttctttttgttaatttatctcaataaaagcccactggaacttcaggtgtcttgtatgtatgttcttgaagcaagttgtgcctttaggaatccgagaatatgttaccattgtacttgaagtggtgtggccagcccactttcttgtgagcctagttaactagttgagtagtcttgcaccctaggctgcccactgcacacacacagtttccattgcagaggtgaagaaccaagattggttgggattctaaatcatcagctcctaggagttattgtcaagtgtaaagttgtatatattcctaaatcttaaagaacaagaaaaaaatcagtagacagacactcccaagaaggatcctgccaatccttcctcagccccccggagtctgcttagatgaaacaaaatctgctaggcaaagatcagcctctagtggaaagagggtggagggaactgcaagatgcctttgtttgagctcagtctacatttccaaccttagcacacttttttttttttttttgagacaaggtttctctgtagccctgtctctcctggaactcactctgtaaaccaggctgtcctggaactcagaaatccgccagcctctgcctcccaagtgttgggattaaaggctgcctggcaacttttttaatttttttttttttttttttttttttttttttttgcttagcacacttctataaatacccataaactgattgtaaacccatggttctcagccttcctaatgctgtgaccctttgatacagctcctcatgtggtgatccccccaaccataagattttttttttttagctgccacttcttaactgaaattttgctagtgtaaatacctgtgttctatggtctctgacaatccctgtgaaagggtcgttccaacccaaaggggtcccgaccgacccgcaggcgtgtagaaacccactgttgtgaactgaatgagaaggcatgctacagcaacaaaaataagtggagggctctgctcaaagatgaatgtccagagcattgtagaattgggggacagatgagtcccgaaaggatgcacagttgggctctgcttctttattttgagaaagctttgtatgcagcccatgctggcctttgactcttactctgcctctgcttcagaagttcgtaggttccaggcatgtttgccaatgcaaagagttgtgtgggaaaggggtatgagacagaatgctgacctaagggtttagctgctttggaggttgtggcaaaaagactccagtcactctccatctctctctctcattctctctccttcccctcaaaaactcttaatcttgctagatttggtgatgcagagtataacacaagtgctgtcttaggataacaggagttcaggatttaaagcagatttcacacatttacagttttaatgtatgaaagtcacacatcacatatccaccttgaaaatcagctctgtggctacatcgtcattatgaaggcattgggatgtatcctctacctaaggaccacttgagattactgtagggatagggctccatgctggaggagtaggttcccatggccatattttaatcctcctttaagtctaggataccaaacatctgcctcccaggtgcttcctcactttctccatagattgactttctccatagattgactgtgtgaactaagttaacttcagattgccagcttccatttagacttacttatcagggctatccaaccctcttaccacccctcagagattcagagaaaaagaggagagtacagtcttctagctccttccattcctttatgatgggttctctgtagctgcttcaactcatctcagactgaagtctatcactgcttcccacctcctgtcagctccttgttagatttccctcttcttgcgcacactggactggccagcagtaatgatgctgcaacaggatccttctgcacacgtttattgggagagcttgattgcagaggcaaagagatgccgagcccagaactggtgctgcttatataggcctaggagaggcgtgtctcacacccggattggttatgcactacgcctcatttgcatgttcctcatctgattggctactctctctgtacctcacagagcctcattatcatacctcatttgcatgtctcacatctgattggttatactctcaaagcctcattatcatgcctgggccaggcagtgtctttgcaaaaaactttactgcatatgtacacattggttgtttgtccaaacttatgcgtggtggccagcagtagtcagtgccactctgcaacggcacatgtggcttcccacaccctctgcctgttaataaaccctcctcacactaacctgttcagagtgggttatctgtttcttgtctctagattgatagatacacgctattagtggccccaggaaacagactgaaaattatattttatggtggtggcacatgccttttaagcccagcactccaaaagcagaggcaggcagatctccgagtttgaggccagcctgatctacaaagcaagttctggacagccatggctacgcagcacaacttgagccttcagccaccacattaagtatgtgttaccaagtcaaggggctgtgaactgcctaccacaaattacgtgttacttagttcaagctacaaggcagctttgagctttgtcggtcccgaagttttggttctcaatggagaatcctccaccagggaattcaaaatggatccttaaaactagaagcaggctgccccttgcccacatcgggctaaggaacccacaggcattttaacactatattcagtagccagtcttgattggaaaaatgaaactgggttgtagagaagaaaaggagaagcggcaaagtacagacagagagtacagacactgggtgaaaggcttttagaactaatgaaagatacaaggcccctgatggatccagcagttctggacatgctatcttctctcctttctccctacttgcctctttcttttgacaagaccatgctatgttgcctaggctggtctcaaccactatgctcagggccctctcacctcagcctctccaggagctgggaccacgggcatgaaccacctcacctggctaatgcttagttctaaattacgctgctgagtggttcccatcttcccaacagtgataaggttcagtaaacataagctaattaggtgaggttaagaatgccaagcttcaccgggtgtggtggcgctcacctttaatgccagcactcgggaggcagagacaggcagatttctgagttcgaggccagcctggtctacaaagtgagttccaggacagccagggctaatcagagaaaccctgtctcgaaaatcaaaaaaaaaaaaaaaaaaaaaaagaatgccaagctttggagataacctgtctacgttcgcttatcccacctccaagactccaagattttcttttcttgtttgttttttattttattgttgagtcagggtctctttttaaaaattatttcttttatttattttcaatttcatgtgcattggtgttttgcctgcatgtatgtctctatgagggtgttggatcacctgtaactagagttgtagacagttgtgaactgccacgtgggtgctagtaattggacctaagtcctctggaggagcagccaaagctcttggccatggagccatttctccagccgggggcaaggtctctttatgtagcctgagctgtcctagaaatcactatataaggcaggctgaccttgaactcagagatctgcctgcctctgcctccccagtgctaagatgagtgctgcatctgaccaactctaactctgcttttcctgtttgttctgtcttcttttgctcccctcctattctttcttgtctccctctttactactccttctccatctccttctccctctccccttgctctcctcttcctcctctcttctgggtctctctctttcccttgctgagctgtggccctaggcatcttcatcttccctgcacgctgtcttgttctcgtgtgagtggctgagctaggaggcagtgcaccacacagaccaggacaaggccctgtaggacacggtcctgttccagtgctttgaggcggccctttgcttatctgacctgtgctgtgaagacacttcccaggtgagccctcctcttttgtctcaggccacaggctggggtcacataagcaggaaagtccaaagggagcagctgtgctgaggtggctgaggaagccctcctagagcaacagttctcaacctagaggtcgagacccttcgggggtcaaataaccctttcacagggttgcctagggccatcagaaaacacagatgtttgtatcacatttcatgacagtagtaagattatagtagtaatgaaagaaaggctgcagcattcggaagactaagagccactgtcctagagggaccttagcaatggaccccagggttaccattgctgccatgaaacaccatgaccaaagcaacctggcgagaagagggtttattcagcttacccttatacctcaccatttatcaccaaaggaagtcaggacaggaactcaagcaggacaggatcctggaggcagaaactgatgcagaggcgatggagtggtgctgcttactggcttgctcctcctggcttgctcagcctgctttcttatagaaccaggaaccaaccagaatgggctaggccctcccccattaatcactaattaagacaatgccctacattgtcatctaagcccaatcttatggagtcattgtctcagctgaggctccctcctccctgatgaccccagcttgaaacaagttgacataaaactagccagcacatagatcacgtcttagtcaaactttctctcaagcttcagtggagtattcctcagccacgcgacagggacaggctgcacaatagggcaggaggccagctggagcatctccacccataaacaggacaggcaccgccctcagctggccacatgcagtccttctgtctcacaatagcttctgaagagagctaccattagtcctgctttgcaaaagaggaaactaagaccccaacaaaccgtagtgactgcaatggacttatggagaccaaatgaggccaaaccagggcctatctcttaggctctcagtgagagtggcctcagcaatctcagttgagtggtctggggacaggcttggctggccctcggcataggtgtctgtgtggccagagtggccgatggcttgcaggtggcactgattgaaagtgagtaggaggtgtgaggaccacaaaaacttcaccacaaaaaagaattgtcacggtcgggaccggctgggccctggcctacctttacatctctctcttgtgctgtttctcaccacaacagaaactgcttatctgcaggtgcgtagctattctaggagaatgaacggtgtgtggcttcctattagtgttcagaggatcagtcacaccaccgaggcctgcggtcccacggctctggccccgcccagcaccggaagcctgcagctccgcgggctggaagctgatgtttagggccagcctgcagccacactggccctttcccctcctgccgaatggggccaaaccgcccagcctgatgggagattttagttttcaaatggcattctagttggctacatatagcggggcacggcagagcaggacacgtggggcagtttaacagtttgctgtccatagatatcttgtcacgggtcatgaccttgaccacctcagcaccccaggactgggacaaagaagtcatgtcattgtggcatcaccaaacatccagagaaccaggagctccttgcctgagaaggccttgaagtgcaggcggctgagacaggggcacacctgacaggcaagagtgaggaaggtagctgttctacaccagcaggggagcagctgctggcatgcctatgtagacaacacagcctttaaaaagtatttcttttattttttgagactataatatcactgtgtcgtttcttcctttcatccctccaagccttcccatacacaccccttctttctttatttcaaattcattgcttctctctctctctctctctctctttctctctctctctctccctctctctctggtttggttttttgagacaaggtttctctgtatagccctggctgtcctggaactctctttgtagaccaggctggcctcgaactcagaaatccacctgcctctgcctcccgagtgctgggattaaaggcgtgctccaccaagcccggctcattgcctctcttttgcataaattattgctctctctctctctgtgtgtgtgtgtgtgtgtgtgtgtgtgtgtgtgtgtgtgtgtacttagatacataaatacaacctgttcagcttgtagaatgctacttgtctgtatgtttttagggctgagcacttttaactcttcct

SEQ ID NO: 1091 - DNA, 2340 bp, Mus musculus
gaattcagatataattcaagcttgttagagggctttaaaaaaaaaagttgattcggtgcatgaaagcaagttaactactgctgctcaccgttgagagacttacaggtgcttgcctgaactgcaataaaggactcatattattgagcaggacttatttatctcttcattttggagagcctcataaactgttattacagtttctctactgactttgaaaagtttgaagtttggaagagacacctgtgcagctaacaaagcatgagcacggccagaacagagaaccctgttatcatgggtctgtccagtcagaacggccagctgaggggccctgtgaaggccagtgctggccctggaggagggggcacacagccacagccacagctgaaccagttgaagaacaccagcacaatcaataatggcactccacagcaagcccagagcatggccgccactattaaacctggtgatgactggaaaaagacattaaaactccctccaaaggatctaagaatcaaaacttcggatgtgacctccacaaaaggaaatgagtttgaagattactgtttgaaacgagagttgctaatgggaatttttgaaatgggctgggaaaaaccatctcctatccaggaggagagcattcccattgctttatctggtagggatatcttagctagagcaaaaaatggaacaggcaaaagcggtgcctacctcatccccttacttgaaaggctggacctgaagaaggacaatattcaagcaatggtgattgttcccactagagaacttgctctacaggtcagtcagatttgcatccaggtcagcaaacacatgggaggggccaaagtgatggcaaccaccggaggaaccaatttacgagatgacataatgaggcttgatgatacagtgcatgtggtgatcgctacccctggcaggatcctggatctcatcaagaaaggcgtggcaaaggttgaccatgtccagatgatagtgctagatgaggcagataaattgttgtcacaggattttgtgcagataatggaggatattattctcacactacctaaaaataggcagattttactatactccgctactttccctcttagtgtacaaaagtttatgaattcccatctgcaaaaaccctacgagataaacctgatggaggaactaactctgaaaggagtaactcagtactacgcatatgtaacggagcgccaaaaagtgcactgcctcaatacacttttctccaggcttcagataaaccagtccatcattttctgcaactcctcccagagagtcgagctactcgccaagaagatttctcagctgggctactcttgcttttatatccatgctaaaatgaggcaggaacatcgaaatcgtgtctttcatgatttccgaaatggcttatgccgcaatcttgtttgcactgatctgtttacccgaggtattgatatacaagctgtgaatgtggtaataaactttgacttcccaaagctggcagagacctatcttcatcgtattggaagatcaggtcgctttggtcatcttggcttagccatcaacttgatcacttatgatgatcgcttcaacctgaagagtattgaggagcagctggggacagagatcaaacccatcccaagcaacatcgacaagagcctgtatgtggcagaataccacagtgagcctgcagaagacgagaaaccgtaacaagcacgctttgacaaactacagaaggctctttggatctgtgacacatcattttgggggggtgctcttctctttgtgggttttttcatctttattttggaactatgaagagttatataagagctcagacatttttcttttttttaaactggtgaagaaaaactgaaaagaagacatagaccttttttgttccacttgtttgcactgtgtgctgactgaacattcgttgcactaactgctggtctttaaagatgttttctggggaaaggggacaaggaaggaggaaaagaaaagaaggggagaaaccctaaaaaagagaagaatttgggtgaacacgtgcacctgtctaaagttctccactagctgactctactgcatttcaacttctccctgattattcatccgtttttaagcctgaagagcttattacttatttgtgcgaagtgccttatgctacaagaccattaagaatatcatctttacacacagcccaaggaatcaacagagtcatgttctattttcttttttatttctttgcctcttcattttggtttcacgttgaagtctcacctcctgttctaccagtactcagcccagggccggaaggtggactagtgatggcagcgccat

SEQ ID NO: 1092 - protein, 483 aa, Mus musculus
QSMSTARTENPVIMGLSSQNGQLRGPVKASAGPGGGGTQPQPQLNQLKNTSTINNGTPQQAQSMAATIKPGDDWKKTLKLPPKDLRIKTSDVTSTKGNEFEDYCLKRELLMGIFEMGWEKPSPIQEESIPIALSGRDILARAKNGTGKSGAYLIPLLERLDLKKDNIQAMVIVPTRELALQVSQICIQVSKHMGGAKVMATTGGTNLRDDIMRLDDTVHVVIATPGRILDLIKKGVAKVDHVQMIVLDEADKLLSQDFVQIMEDIILTLPKNRQILKATFPLSVQKFMNSHLQKPYEINLMEELTLKGVTQYYAYVTERQKVHCLNTLFSRLQINQSIIFCNSSQRVELLAKKISQLGYSCFYIHAKMRQEHRNRVFHDFRNGLCRNLVCTDLFTRGIDIQAVNVVINFDFPKLAETYLHRIGRSGRFGHLGLAINLITYDDRFNLKSIEEQLGTEIKPIPSNIDKSLYVAEYHSEPAEDEKP

SEQ ID NO: 1093 - DNA, 58258 bp, Homo sapiens
  misc_feature (1)...(58258): n = A,T,C or G
ggcttgcacctgtaatcccagcattttgggaggccaaggtgggaggattgcttgagcccaggagtttgagatcagcctgggcaacatagcaagaccatcgtctgtacaaaaaaataaagaaattagctgcatgtggtgacatgcacctgtagtcccagctactcaggagactaaggcaagaggaattgcttgagcccaggagattgaggctggagtgagccatgatcatgccagtgcactccagcctggatggcaaagtgatactttgtcttaaaaaaaaaaggcgggacacggtggctcacgcctgtaatcccggcactttgggaggccgaggcgggtggatcacgaggtcaggagatcgagaccatcctgtctaacacggggaaaccctgtctctatcaaaaatataaaaaaaaaaattatccgggcgcggtggcgggcgcctgtagtcccagctactcgggaggctgaggcaggagaatagcgtgaacctgggaggcggagcttgcagtgagccaagatagcgccactgcactccagcctgggtgaaagagcaagactctgtctcaaaaaaaaaaaaaaacaacttaacattatctatttatttattttaatttttagcacataccacgtttgggaaaaaagaatttaacacatttaccatgtattagatatcgtgctagtctctccacatacattgtcttattttaatcaattatccaatcccattcaatagattcctgagcttctaatatatgtatacaaaataccttactagatgttattggtgaaagaaagatgaacacaggctgggcagggtagctcgggcctataatcccagcacttcaggtgggaggattgtttcagtccaggagtttgagaccagcctgagcaacctagggagcccctgtctctttaaaataaggccggcacagtggctcatacctataatcccagcactttgggaggctgaggcgagcgaattacttgaggtcagaagtttaagaccagcctggtcaacatggtgaaaccccatctctactaaaaatacaaaaatttgccaggtgtggtggtaaacacctgtaatcccagctacttgggaggctaaggcaggagaatcacttgaaaccgggaggtggaggttgcagtgagctgagatcgagccattgcattccagcctgggcaacaagagtgaaactccatctcaaaaaaataaaatagcctggcgtggtggctcacgcctataatcccagcactttgggaggccgagcccgaggcgggtggatcacttgaggtcaggagttccagaccagcctggccaacaaagtgaaaccctgtctctactaaaaataccgacaaaaattagccaggcatggtggcacatacctgtaatcccagctactggggaggctgaggcaggagaattgcttgaacccagaaggcggaggttgcagtgagccaagatcgtgccattgcactccagcctgggtgaagaagtgagactccgtctcaaaaaataaataaatttaaaacaaaaaatacaaaaattagctgggcatggtggcacgcgcctgtagtcctagctacttgggagggtaaggcagaagaattgcttgaactcaggaggcagaggttgcagtgagccaagatcatgccactgcactccagcctgggcgacagagcgagactctgtctcaaaaaataataataattaattaattaaaataaaataaaatttaaaaattagccaggcatggtggtgcctgcctgtggttccagctacttggcaagttggggtgagaggatagcttcagtcccagagattgaggctgcagtgagccgtgattgtgccactgcattccagcctgggcaacagagcaagaccttgtctcaaaaaaaaaaaaaaaaaaaaaaaaaagaaagaaagatgaacatgactttgttcctgtcctcagtgagcttagaaataacacatctttacaaatgggtatgacacaagactataaatccagtgattatataatttattgtcccaattgggatagttctgaggataaacaggagcactaataataattaccctagaaaatcccagtgtgttctgaagaaatctgattttatcaccttagcaatgagcaagctcaaagtgatgggagcacaaggagcactgggatgaatcagcaaagctcaatggtagaagtggatttgagttgggcttgctgttggggagggcataggcaatcaacatgtaaacaaaataatttcagatcatttaatggggtacagagtgagggagaggggcactactttaatatcatcagggaaggcaactaggaggaggtaacatttaagctgaaacaaattatgagaagaaccaagaaattcaaagataaaaatatcacaagacctgtcttatcccagcaatgatcagaaggtcagatcactcatggggtttggggcaaggaggtcccaagggcctcctacttattctgaagagagatgagggatcgaaatgttatccagtagttaatggagaattatgaaagactcttcaacagaatagtgatctgactgggaagactactctggcattactgtacaggatgggttagagaggaaaagaggttgaagcaggaagtccagtaaatagtctaagcaaaagaaaaaaaccctgggttgagacagtggcagtaatcatggagaagcagagatggaagtgatatcccagagcaagaatggccaagattttgcaacggatgtcacctaacatagcgcctgtccctgggagcccttcagtgaatacttgttcttccctcttctctcattcaacctggaaccagagtgagggaagattgtttttgtttgttgtttagaatggagaaaaacttgggaacaaatccaggttgagaggaagaagcaacagagagagaaacatttaataatattaaaaatataaaggaaaggaggtaatcaatggaatattttattttaaaaaaggatagattagccttacataggaggtgtgatgctctatcttccaagaaaggaacaaaatgaagtttgtcagggagggaggtggaaagtttatgaagcttctgtggatttatgaaggtgggaagtttatgaagcttctatttgatttgaaggtaagcttatggatagaagaaaagatgtggaatgctgtagtaggaaataattgtccttgaagaacaattaagtggttctcattcctggctggacattaggatcatccagggagccttaacacacaaaaaaaaatgacgctggaccccagccccaaggattctgatttaattctcctgggatggggcccaggcactagtggtttcataagcgcctctgttgactctaatgagcatccacaattgagaaccagcagtaaagggtttgtggagcagcagaaagggctcagctgaggttcagaagcaagaatttattgttgaaccaatcagcctggttacagggctctctccagcatcaacattcctggagcagaggctgtgaaattagagtgtggcacttgtttattaaggttggtagggcacaaagctgaagagctgagagacaatagaggctagggaaatagaattgaattggccaacctcaggctgtaatctgatagaataagaagaggttcagacaaaagtcaacaaaataacaatagcaacaccaactaatttttttgagtgccatttgccaactactaaaataagtgatttatttcattcacttaccctcatgacactctaggtcctattatccccatcttatccactttattgtttcattttttgtacagacagaatttctgtctgtcgcccaggctggagtgcagtagcacaatcataactcactgcagccttgaactcctgggctcaagcaattctcctacttcagcctcctgaatagctaggacaataggtgcacgccaccctgcccagcttattttttgtagaggcgggatgtcaatatgttgccccggctgaccttgaactcctggcctcaagcgattcttctgcctgggcctccgaagtgctgagattacaggcctgacccacgtgctggccactttttacccattttataaatgggaaaattgaggttcagaagttaagaaatggccaggcgcggcggctcacgcctgtaatcctagcactttgggaagccaaggagggtggatcatttgaggtcaggagtttgagaccagcttggtcaaaatggtgaaacaccatctctactaaaaacacaaaaattagccgggtgtggtggcacacacctgtagtcccagctacttgggaggctgaggcaggagaatcactagaacctgggaggcagaagttgcagtgagccaagatcacaccactgcactccagcccgggcaacacagcgagactccgtctcaaaaaaaaaaaaaaaaaaaaaaagagttgagaaatgtttccacatttatggagtaatagttaataagtggcagaactgggattatgaacctaaatctgtctgactccagagcctgagccctggttgcacaggagcaaaggaatgggaaacataggaggataggggcttgtggtaatatatctaggattctgagtgagatttagatagacccagaggaaaggagatgagagggtttctaagggaaacaatcagaggtgagggaatgtaacctttcaggagaccagagcagcaaatgtatggggggaggaagagtaggaaatccgactgggtaggcatattggcagtctcagtcggtctatggagtgtagactagatgtagtaaaaggaaactgggagccactgagggggtagtttacggtgtggagatatgataaaaagtagtctttaaaattcatcaggcagatgaaaagcaaggagggtcactgagaagatctctgcactgaaatacttttgtcttcctttgttccttccttgtcctggtagccacagatgttacacaatccaaccatggcactcaggacagaagacattgcccattctttagctataaattacattcccagggcccaaacctacacagttgtattttcaagaatcaataaaagtctctgcagattgactagtggcaggaaaccagggctggacacttaatgattgttcagactcctgtcgctacccctgcacagaaggttgtcagaagcagaatcttgtcacaggttcttgggcacaaagggggcagattacacaaaccaacatcaggcagttcaacaagatcgccatagtgtgaacccccatcagtgttattcctcggcaactgcccctgaactaacttggaaaatacccaaggagaacaaggtatcttagatgaggacgatgtcagttctttcttgatctcagtaagtcaaagtaaatttatacctaaatagctgttttccagatttcagtgtcttccagccacacatattttctttttcttttttcttttctttttttctttttgagacggagtctcgttctgttgcccaggctgaagtgcagtggtgtgatcttggctcactgcgacctctgcctcctgggttcaagcaattctcctgcctaagcctccctagtagctgggactacaggtgcatgccaccacgcccagctaattttttgtatttttagtagggacagggtttcaccatgttagtcaggctggtcttgatctcctgacctcgtgatccgcctgcctcggcctcccaaagtgctgggattacaggcgtgagccactgtgcccggcccagccacacattattttcaaattaataaataagttaaaattgctggcatgcagtcatcttagcgaaactgaagagtcaaaatgaatagctagaattctctgggtgatgaccagaacatataccatgctgagtcccgatgtggccgaaggacaccgtgagctgagccagctagctagcttggttgtggtgtgctgggaatgagggttatgttatctgtgaaagagaatacaaattctgcaaagtaaacctggcagtttggggaaaatgtgtttaactcacccactcccctcctcgtttgtactattgctttcctacactttttttttttttttttttttgagacagagtcttactctgtcacccaggttggagtgcagtggtgcaatctcagctcactgcaacctctgcctcctgggttcaagcaattctccgccacagcctcccaagtagctgggattacaggtgcatgctgccacacccggctaatttttgtatttttagtagagatggggtttcaccatgttggccaggctggtctcgaactcctgacctcacgtgatccgcccaccttggcctcccaaagtgctgggattacaggtgtgagccaccgcgctggccaactttcctacttttcaatttgagtttactcaggggttggaacatttattccaacaaaatgtgcctgatgtaacctctcagtgattaagcacgcctgcttagtatgcatcaacttcagcgcagtatgtgcacctctctgaggacatctctactaagccctcagtgactgatgctgcttcactttcttcaggtgtataaattgaaaaggcaatttttacctgctatgaagtcccaagaaaacgggacttggctccttgggcatattagcctttagtcttgttagtgatgatcagatgttgcttgagcatatttggaaaataactttgtatgttgaaattttgggaaatcaaagtattatactgcaaatcacttgaaagagggcaaataccaaatggtaaagcttagccagatgtgatataatcatttcactgaagatatgagataggtaaaatttttttcttataggtaatgaacacatttgattgtaatttgagttaaagtattatagtcccttttaaaaaaaaagcccagaatgttaaaagtgtgaactccatttcagcaagttgaaaacatttgagtgtttaagatattatcacaggtctgcgtattccaggttcaacttactaggaattctggattctaagtattttaaattgaagttaaagtgaaatcaagtgtaaattaatctgtgatttttttttcgttctggttatttttaggtaaataaatgaggtcaggatgtgagactggcgaataatatatgctgagataacccattactgtgattgaattccaggaggaaattgaagaggggtgatgacgcaaaggtgaatacagacaacatgaaaacggctaatacatgttgggaaactttttttttcatttctttttctttttcttttttttttttttttgagacggagttttgctcttgttgcccaggctggagtgcaatggcacgatcttggctcactgcaacctccgcctccccaggttcaagggattctcctgcctcagcctcccaagtagctgggattacaggcacctgccaccacgcccagctattttttttcttttttttttttttagtacagacggggtttcaccatgttggctaggctggtctggaactcctgacctcagtcgacccacctgcctcggcctcccaaagtgctgggattacaggcgtgagccaccgtgcccagcccaagtgaaaaactctttaccacaattaataggtgagttcattagggatgatagcacacccttcagaaaccgtatttactacagatctcccacaactatcacactcaatactaactaaaaggccagaggattggattcatataacttttttaaaagtacacatatattttataaatataaggatattatttgcactagcaatttatctgtattcctaaagtgtcatacaaatgattcttgcaaatctgttttaactagggagaaaacaatgtattgagatagttggactagacctatctaccactaacactaaacttggaagaaaagatccaagagttcatagcttaattctaaaccatctatgcttctcacttgaaaacagagaagggctgatgtaaatgagttgtgagggtatctgactaccttaaaagcagaatatttgaaggttttagccctggaaggattcctaggtgagaaggcggcacctatttcatattctacttttggttgcctcctggcttttgttttgtgacctcaaccagactccttgtgtaggttacaatttatttgtggatgtgaacccgggctccttttgtaggttatagtttatttgtgggtgtgaacccccttcctttgcctggttcaatttcttcagtggtttaggaaagacacccctccaagcagtggcctgttttaaatccgtaggcctctcttcctaccactcacttcttggcccaaccccccttcacattcctctgcttgggaagatattggggcaaaaaaggcctcatacattttttattaagaaaccattttctctctaggatgggcacaaggtgcagggctatttccttacattagaaggtattttaaaacctgggctggagacgccatgctgtaaatttaaaataaaaaaaaaatgtaagccgaaccttctttttaaccttaagaatagtcttcactattctccaccaccttcccaccggctgtgtagaaataacgaccaccaaatgagaataggctatttactcagagctggcaagagtcagccgcgacccatcacttgatttaacagactcataggcaggcaggggagtggaaaagctttacatatactgaaaaaagggagaaacttcaggttggctctgattggaggatgttggcatcgggaagttggaggagggctatactagaagcagggcttcttacgcgattggtgtgaggagcacatttggctttctctgattggcccagagctggaagcaggggcaagaaatagggaagctgccggttaaagattaagtcctgacccttctggccgattactgaagaggttatgggtaggaggtcatggttaggtttggccattctttgtatattcagtctctcaattgggtgaggattagattttgtttctcttgacctagctagcttttagctccaaagttttgtttaacttggaagaagacagcagttctattatttctgtcaaggataaacacagacattgggatctgaaaagtattatgggaacatacataaatatcttcatagtgagggtcaggccggagagtcaccctttgccttaagcttctccatttccttactgaattcctatttctattataactgacgcttcactagcttccctccctttagtggagggcccggcctcctccgcccctactttcttcagtcttgcccttcgagggcaggagaagacggttgcgccctactaactcttcaccttacagtccagcttctccccccaccaccccggtgcgctctctcggtttgctaccctctccaccaggcctccccactccacctgcgcaacgcccccagctccgtgctctccggagtaatcccccctcagtcgcactctcacagcccggcccctgcccccgcctcacccccagttgtgccttcacctcccggttcctcctagacaggtcccccaagatacgccctcacagtccggtcccccgccgtcctctcccggcgcacgctcaagtccggtgccttccccccgcagacccccgaggcgcaccctcaagctcggtgcctctgcgccccccgcaggggcgccctcaagcctggtacccttcacatgagagccccccgggcgcaccctcaagctcggtgtacccccccataccacccgcaggcgcgccctcatgcccgaagacttcccccgcccaggtgcaccctcaagcccggtgccttcccccacaaccagcgcccccaggcgcaccctcaagcccggagcctacccgccgccaggcgcgccctacaggctcgccccgtcccaccgcgcagcgccccccgcgcactctctggagtcctccctcctgcctggtgcggcctccgggcccggtcggccccccttcctgcccccacactcagacgcgcgcccggcgtctccgggtcgctagttccgcgccttcctgcatggaggcgcgccccgagaggctcggacgcggccccttaggcccggcatcagcctccccggccagcaggagaagtcaggtcagcttcctgtccccgagcagctgcccgggggccagttttcaaaacatatccttagtcatgtaataaagagatgttcctctggtctcaactcccgatttttactttggaggggcgaaggcagggctacccttgccagccaccatttctcaatcacgtcgcggctgtggaaaagcagccgtcctgtcccttcagaaaggaactcgtatttccccctcgaacttttctcgtcggtgtgagagaagggccctccattttctcctcaggaagctttcgcggcccggcttcctctcaccaccaagccaggaaggcagtgacgccgcggcgaatatagccgcggcggccgaggtttcgccatcttgagtggaggaggagccgcggtcgccgccatgcggagaggcagggaaagagggaggaggcggcgggcgggcgaacgggcgagcgagggagggggcagaggagccgagttagctcagccaggcggcgacttcggcggcgccacgagagcgggcagcggaggaggtagggctggacagccgggggagccggcggctcgggcggctggcctgcgcgcccctcggagcggggcgggggcgggggcgagaggaggccgtagcgagagggctgggtgggggcgggcggaggtttccgaggaggaaggagcgtccgccattttgggagcttcgagtcaacaataaaggaccgagggtgccgagcgggagtggcctcgttggtaggacacgggcccgagtcgcgaggcttggggtgaggtggtggggtcgaggtcagcggtgctttgggggctgtggggagcccccccgggccggctctgggggactctcgggcggaggcctaaggcctggccgggcctggggaggaaggcggtcggcagctgtgtggggtgggagcgcctgagaggaggcgaatataggaatgtggtgcgcagcagggtcggcaggaggaacaggctaagtactcggagtagctttatcgaagatgagggaatatgaggccgaagggggcggcaaggacttagggggatgatggtggaggttatagggtacgaggcggccctatagggggcggcagggacatgctgtattggagggctcggtttagaagcaaaccggccgctgcttgattgcagtaggccttgcgggtcaataacaagagggtatttatggagcccccgactcttggaggaaaggagggggatttctggtttagggggtccatttggggcctccttgggggagtccctattgtttgctactgatggagcggttgctggctcatattgcgcagataagattgcagagccccaaccttttgtgtttatggtcagaagtgtgtgtgtttggggcgtggggcggggtgcggggggacaagaaatttcccttcagttacggggttccagtcattagtcaatgactctttcccgtatctctctcctttctcttcctcagcccccatttcccttcagaataaaacccagtcactccaacttgcaggcaaagctagaaaaactgcgctgcatttgcaaacaaaagctcttgttggcgatgacgatactgttttgggtgtgaaactgtcaattgctaactacgatctgtgaagtgctgtaattaactccgctaggggctcctcccaactagtctacgtttcttgttgtttgttttttgtttttttgttttttgtttttgaaaatgtagaaaacttgcaaatctaaattgggaaggggtaggaggaatatttccttctctgagaaaaagctgcagtgcaggtttcagtttaagaagggagcagttatcacatagtctcattttggatttaaggatataggaggtcttactgtgcatgatggacagtaatgatgatatcgttcggtctttagaggttgcccttttcatcctcttagtgctctgcaaacagctaagtctctgtgaactgcgtgatatcgctgatcataatataaaaccgtcaatacaggaaagtagctgttaaccatatctgcttaagaggtcagagtctgaagtaaacagctttgtgtatgtgataatcaggatttgcttgtgagcaacttggtcattttttttttaaggaaggcataatcaaggagcattttcttcataaatgttgagatctgttgactttaaaattttgagtttcacatgccttggtgtatggcagaaagaatcagcactcgtaagctagtgtattttatataagaaatgtaacggggttgctgggagcggtggctcacacctgtaatcccagcactttgggaggccaagacaggcggatcagctgaggtcaggagttcgatactagcctggccaacatggcaaaaccccgtctctactaaaaatagaaaaaatttagctgcgcgtggtggcaggcgcctgtaatcccagctactcgggaggctgagacaggggaatcgcttgaacccaggaggcggcggttgcagtgagccaagattgtgccactgcactccaacctgggcggcagagcgagactccgcctcaaaaaaaaaaaaaaaaaaagtgtaacggggttaaatcaaaagccaacagagtagggctttgttttcgtgtctttgtatgtttttattaactacaattaaaagtaagatttcagccgggcacggtggctctcgcctgtaatcctagcactttaggaggctaaggcgggcagatcatttgaggttaggagtccaagaccagcctggccaacttgataacaccccgtgtctactgaaaaatacagaaattagccagacctgtaatcccaccaagctacttgggaggctaaggcatgaggatcgcttgaacctgcgtggtggaggttgcagtgagctgagatcgggctactgcactccactctgggcaacagagtgagactctgtctcaaaaataataggccgggcgtggtggcttacgtctgtaatcccagcactttgggaggccgaggcgggcggatcacctgagctcagttgttcaagaccagcctggccaacatgtcgaaaccccgtctttactaaaaatacaaaaattagctgggcatggtggcgcatgcccgtaatcccagctactcaggaggctgaggcaggagaatggcgtgaacccaggaggcggagcttgcagtgagctgagagcgcgccattgcactccagcctgggtgacagtgcaagattctgtctcaaaaaatacaataaaaaataaaagtaagtaagatttccatttacgggataattttaaactgaggttgactagttttgtgggttttgtttgtttgtttgtttgtttgttttttaagcagagttttgctcttgttgcccaggctggagtacaatggcatgatctggactcactgcagcctccacctcctgggttcaagtgattctgctgcctcagcctcctaagtagctgagattacagggccaccacgcccagttaatttttgtattttagtggaacggagtttcaccgtgttggtcaggtggtcttgaactcctgacctcaggtgatccaccagtcttggcctcccaaagtgttgggattacaggcgtgagctaccgtgcccctcctaccagttcttttttttttttttaaactattaattagctttactactctggatttcttggaaagttttcttaaaattactagtgtgtttagtcttccgcggatttttttttaaacaggaattttcctgtttttttaaatttaaaattagaatagttattagctaagtttgttataaatgaataaaattattagagtcatcttggttttgtcaatttcaaaataaaaattcatttatacaaaatttgtgtatatcatccgtccttgggatcattacttgctggatgcattatggcagaaatacactattctcttgactgcttcatttattgttttaaaggacaaaaaggaaaaaagaaaatacatttttcttcttaaagttttttgttgttttttgagacaaggtctctgtcacctggctcactgcagcctccgtctgccaggttcaagcgattctcgtgcttcagcctcccaagtagctgggactccattacaggtgtgcaccaccatgcccggctaaattttgttttttgtttttttttttcttgtttgtttttgtttttgagacggagtctggctctgtcgctgaggctggagtgcagtggcacaatcttggctcactgcaacctccgcctcctgggttcaagcagttctctgcctcagccccccaagtagctggaattacaggcgctcgccaccacgcctggctaatttttgtatttttagtagagacagggtttcaccatcttggccaggctgatcctgaactcctgacctcatgatccaccttcctcggcctcctaaagtgctgggattacaggcatgagccactgcacccggcctaaattttgtatttttagtagagatggggtttcgctatgttgtccaggctggtctctaactcctgacctcaagagatcgcccgcattggcctctcaaagtgctgcgattacaggcctgagccaccagcacccagcccataaagtttaatagttgaaatttgtaagggcacaaaggtgtttttttctggaagtgtgaagttcaagtcaaaagctcacttaaatctataaggactctcggttgctattacaagtagaagaaaattaatgaattgtcttgtttaaattgtgtgatacttcagtgagttgtaatgcaattaagtataatgaatcactgacttttagagatgtcagagacttagagaattcatggggaggaaactgaagagaagagattatcattgacgagtagtgctaatttactagtctctttctacttaatctctggattgctttgaattaacaattttaaatgtttgatattggcctcattgtgtttttgagatagttcaaagttgtgtctatcctagcttggctcgtgatttggtctaagtgtagctgtattattaattctttaatataaaagatgataattcttttaaaggggttcttttaaaagggaaacaaagtttttctgttgtgtttgctaatttaattttgtttgtttgtttcagattgacgtgagtgaattcagatataactcaagcttgttagagggctttttaaaaataaaaagttgattccgtgcaagagagcaagttactgctgcttaccgttcagagacttacaggtgcttgcctgcattgcaataaaggactcatttattgagcaagacttatatttatctcttcattttggagagcctaataaactgttattacagtttctctactgactttcaaaagttttgaagtttgaaagacctttgcaattaaaacagcatgagcacggccagaacagagaaccctgttataatgggtctgtccagtcaaaatggtcagctgagaggccctgtgaaacccactggtggccctggaggagggggcacacagacacagcaacagatgaaccagctgaaaaacaccaacacaatcaataatggcactcagcagcaagcacagagtatgaccaccactattaagtaagtgttagagtaaattattaataaacacttgtggggaaccaagatttgtgttactttggtgttgactattaatacttatgccttaatttaaccattttgattccaaatagaggacagatgactttgttttatggccagtaggtatttgcaatagaataatatatttctgccataatttgttcagcaagtagtcatcctgaggtcagatgatacacacaaattttgtataaatggtttttggaaacatttctggctttcataattagtgtaaaagttattagcttagtttgttgtaaatgaataaaattattagtcatctcgtttttgtcagtatagtttttttacgactgcaccttaccctagttaaacagcagataaagccaactttatgtattaaatttaaagactcagtctgagtctttagagtctttaaagacttgcccagccttctgaactccaagcattattcactcagaaaattttctcgtaactttttttagcttatggaacttagcttttttactttaaaaaaaaaaaaaagttggctggttgaggtgactcatgcctgtaatccctgtactttggggaggccaatgtgggaggatcacttgagtccaggagtttgagaccagcctaggcaacataatgagactctgtctctacccaaaaaaaaaatttttaatttttttcctccttttacatataaaaagggaactaagaattttgaactcacagaacacagttctgaacagtctcagaaaccttttgttaaccttaaaattgaagagcctcctcttactagaggatattttttcttttaaagctgaaagtatgtaggctatttgttacttttaagtgcatagtttaaattacaatatttgaatggtaaccatcactttaaagattcagttataggaaattaacatttaagattcttgactccagttgatgtttggcttttgttaagaacttgccatatagggccgggtgcagtggcacacgcctgtagtccaagcacattgggaggccaaggtgggcggatcacctgaggtccggagttcgagaccagcctgacaaacatggagaaaccttgtctctactaaaaataaaccccgtctctactaaaagtacaaaattagctgggcgtggtggcacatgcccataatgctacttgggaggctgaggcaggagaatcacttaaacccgggaggcggagttgcagtgagccgagattgcaccattgcactccagcttgggcaacaagagcgaaactccatctcaaaaaaaaaaaaggccaggtgcggtagctcacgcctttaatcccagcactttgggaggctgaggcaggtagatcacgaggtcaaaagtttgaggccagcctgaccaacatggtgaaaccctgtctttactaaaaatacaaaaatcagctgggtgtgatggcatgcgcctgtaatcccagctactcaggaggctgaggcgggagaatcacttgaacccgagaggtggaggttgcagagagccaagatcgtgtcactgcactccagcctgggcaacagagaaatactccatctcaaaaaaaaaaaaaaacttgccatataaaataatttaaccctgggaatctttataagatgttgacactgggttactgaactgaggtatatgttttattacaacctagatcttttcacttcctacagaaaaatagcttatacaagctaccagactgtcatatagttaccgtatgtggttcactaggacctctaagaactaattttcagcagaattggttaggtcattgggagaattggtattagtgtatattctgttatttttaaggtgaatgctttaattggtatagaaatgaatactacttcagttgtagtttgtcttggcagaatgtaagtaggttagcaaaatttagactatttttaattttttttataactttttttttttttttttgagacagggtctcactttgttgcctaggctggagtatggtggcacgatcatggctcactgcagcctcaacttcccaggctcaagtgatcctcctgcctcagccctacaaatagtggggactactggcatgcaccagtagcgacggcgttttgtcatgttgcccaggctggtctggaactcctgagctcaagtgatctgcccacctcgacctctcacagtgctgggattacacatgtgagccactgcgcccagcctatttttaattttttttttttttgagatggactctcactcactctgttgcccaggctagagtgcaatggtgtgatctcgactcactgcaacctgcacctcctgggttcagttcaagccattctcctgcctctgcctcccaagtagctgggattacaggtgtccaccatcacgtctggctaatttttgtatttttagtagagatgagatttcatcatgtttgcaggctaggcttgaattcctgacctcaggtgatctgcctgcctcggcctcccagagtgctgggattacaggcgtgagccactgcacctggcctatgagaatattttctatttaaaaaattctggggctggatatgatggctcatgccgttcatcccatcactttgggaggctgaggtgggaagatcacttgaggccaggagtttgagactaacctgggcaacatagcaagaccctgtctctacaaataataaaggctgcagtgagctatgatcgcaccactgcactcaagcctgggtgacagggtaagaccccatctcaaagaaataaaaaataaattctgatttggggacaacagtggattttgatttttcttttctggttttcctacgattaatggtttcttttcagttctgcggttcttcaaatctcattttctctgccctctcttccatgaagtcctctagatcccatcaagtgtctcagaacacttctaatacttaacctccgtcactttctcattttaaatagttttttcatctcataagattataaatttcttgtggtcaggttttgcattgtatcttacgcattattattcactattttgttgaattcaacggtatgtcaaactgacatcagaaacttcgatgatacaggcttagatgaaaggctttagtaggccgggtgcggtggctcacgcctgtaatcccagcactttgggaggccaaggcaggaggatcacgaggtcaggagtttgagaccagctgaatccccgtctctactaaaaatacaaaaactagccaggtgtagtggcaagctcctgtaatcccagctgctctggaggctgaggcaggagaattgcttgaaccccgggaggtggaggttgcagtaagccgagatcatgccactgcactctagcctgggtgacatagcaagactccatctcagaaaaaaaaaaaaaggctttagtacagtagtagtcttggaattggtagcaaaaagttaccaatgttagagtatgcattatgtaggacctagttttaagtaaaataagtggtctttttgtctgtgaatggagcatttgagatgttttggggactctggttatgtaagaacagctgcagtgaaaactttttcgaagatgtcacagttaaatactttgtctgcagatgttccctgatcttttttttttttttaaagatgctttgagtatttattacttgaggtttttacctggccaaaaagagagtttatttatattctccttgtttttattctctttcatgatttctagcatttccaataaaaaagaaagattaagagatgctcattggctaatactgtgctattattttgccaggcactgtgctgagtgcattatatcaattgtttgatgtaactgttaacctattttgttttatttatttatttgggacggagtcttgctctgtcgcaggatcttggctcccgggttcaagcaattctcctgcctcagcctcttgagtagctgggattacaggcacatgccaccatgcctggctaatttttgtatttttggtagagagtgggtttcaccgtattggccaggctactctcgaactcctgacctcaggtgatccgcttgccttggcctcccaaagtgttgggattacaggtgtgcgcccaccttatttatttttgagacagagtctccctctgtcactcaggctggagtgcagtgtcgtgagcttggctcactgcagtgtccgcctcccaggttcaagtgattcccctgcctcagcctcccgagtagctgggactacagttgtgtcccaccatgcctggctaatttttgtattttcagtagaggtggggtttcaccatattggccaggctggtctcgaactcctgacctcaagtgatccgcccaccttggcctcccaaagtgctgggattactgatgtgagccaccacgcctggcctgttaacctattttaaaaatgagaatagacggccatggtggctcacacctataatcctatcactttgggaggccgaggcaggtggatttcttgagcccaggagttatataagatatataaaatcttacagtttttaaatgttgagaactaatttaaactcatttaaattaaaacacatgctgtgtaggtcaaacaaaacaccttttgacaacagttacactgtatacaatattgcttaagaggatggatgccttaatcccttctgttcttgatttttttatcctcctgagattctctataagaacactttttctaaagttgtttaattatcttgttagatatattaaatggaatatattaaacttactgtgcttttttaacacttaattataattgagatgaatcatctttgttaggatgctatgaattttgatacttcaagtttactgtattctctctagacctggtgatgactggaaaaagactttaaaactccctccaaaggatctaagaatcaaaacttcggtaagttggttgtaaaatacgagtagaataatggtggggaactagaagtgaggtatagctgtccctcggtatctggagggaattggtttcaggaccataacaccactgccaccctcctcctccaacccagtaagatagatattcaggctatatattcccattttgtggatgagaaaacaaatgctcagcagttagttctcttagcctattgttttcaaccgggagaatttttgtctcccgggggcatttagcaatttgtagaaacatttttgcttatcatcaataggggggaagctaaaggacagccctttacaacaaagaattttgtggcccaaagtgtcagtagtgctgagcttgagaaatttgacttagccaaagatatttgtagctcatgagtggtagaggtgggatttaacttcatatcttgtgatttgcaattcatggcatgatatttgtgtaaaaaaataacactattccaccagtccttaggagactgtgaccaagggccgggcacagtggctcttgcctgtattcccagcactttgggaggccgaggcaggcggatcacctgaggtcaggagttcaagaccagcctggccaacatgttgaaaccctgtctctactaaaaatacaaaaattagtcgggtgtggtggcgtgcgcctgtaatccagctgctcaggaggctgagacaggagaattacttgaacttgggaggcagaggttgcagtgagccgagatcacgccactgcactgcagcctgggtgacagagcgagactccatctctcgaagaaaaaaagaaggctatgaccaagtgctctttccccaaaacatagttttttaaaaagcttgtgtgtcaaagcagggacagtggtttttcttcaggaaaagttgaaatacagattaaaacaagtaatctgcatatatttatatttaagattgggcaggtaaagtactaaagtcagagaagttttctttccttttttttttttttttttttttttttttgagatagagtctggctctgtccccccaggctgtgcagtgagtgcgatctcacctcactgcaacctccgtctcctgggttcaagcgattctcctgcctcagcctcccaagtagctgcgactacaggcgtgcaccaccaccctggctaattttttgtatttttcgtggagttggagtttcaccatgttggctaggctggtcttgaacttctgacctcaggtgatctgcccgccttggcctcccaaagtgctgggattacaggcatgagccaccatgcctggcccagataaattttcttaaacacagataaatttaccaaaggacaccaaatttaccaacagggttatttattcttttattggtcctttttgtttgactaggatgtgacctccacaaaaggaaatgagtttgaagattactgtttgaaacgggagttactgatgggaatttttgaaatgggctgggaaaagnnnnnnnnnnnnnnnnnnnnnnnnnnnnnnnnnnnnnnnnnnnnnnnnnnnnnnnnnnnnnnnnnnnnnnnnnnnnnnnnnnnnnnnnnnnnnnnnnnnnnnnnnnnnnnnnnnnnnnnnnnnnnnnnnnnnnnnnnnnnnnnnnnnnnnnnnnnnnnnnnnnnnnnnnnnnnnnnnnnnnnnnnnnnnnnnnnnnnnnnnnnnnnnnnnnnnnnnnnnnnnnnnnnnnnnnnnnnnnnnnnnnnnnnnnnnnnnnnnnnnnnnnnnnnnnnnnnnnnnnnnnnnnnnnnnnnnnnnnnnnnnnnnnnnnnnnnnnnnnnnnnnnnnnnnnnnnnnnnnnnnnnnnnnnnnnnnnnnnnnnnnnnnnnnnnnnnnnnnnnnnnnnnnnnnnnnnnnnnnnnnnnnnnnnnnnnnnnnnnnnnnnnnnnnnnnnnnnnnnnnnnnnnnnnnnnnnnnnnnnnnnnnnnnnnnnnnnnnnnnnnnnnnnnnnnnnnnnnnnnnnnnnnnnnnnnnnnnnnnnnnnnnnnnnnnnnnnnnnnnnnnnnnnnnnnnnnnnnnnnnnnnnnnnnnnnnnnnnnnnnnnnnnnnnnnnnnnnnnnnnnnnnnnnnnnnnnnnnnnnnnnnnnnnnnnnnnnnnnnnnnnnnnnnnnnnnnnnnnnnnnnnnnnnnnnnnnnnnnnnnnnnnnnnnnnnnnnnnnnnnnnnnnnnnnnnnnnnnnnnnnnnnnnnnnnnnnnnnnnnnnnnnnnnnnnnnnnnnnnnnnnnnnnnnnnnnnnnnnnnnnnnnnnnnnnnnnnnnnnnnnnnnnnnnnnnnnnnnnnnnnnnnnnnnnnnnnnnnnnnnnnnnnnnnnnnnnnnnnnnnnnnnnnnnnnnnnnnnnnnnnnnnnnnnnnnnnnnnnnnnnnnnnnnnnnnnnnnnnnnnnnnnnnnnnnnnnnnnnnnnnnnnnnnnnnnnnnnnnnnnnnnnnnnnnnnnnnnnnnnnnnnnnnnnnnnnnnnnnnnnnnnnnnnnnnnnnnnnnnnnnnnnnnnnnnnnnnnnnnnnnnnnnnnnnnnnnnnnnnnnnnnnnnnnnnnnnnnnnnnnnnnnnnnnnnnnnnnnnnnnnnnnnnnnnnnnnnnnnnnnnnnnnnnnnnnnnnnnnnnnnnnnnnnnnnnnnnnnnnnnnnnnnnnnnnnnnnnnnnnnnnnnnnnnnnnnnnnnnnnnnnnnnnnnnnnnnnnnnnnnnnnnnnnnnnnnnnnnnnnnnnnnnnnnnnnnnnnnnnnnnnnnnnnnnnnnnnnnnnnnnnnnnnnnnnnnnnnnnnnnnnnnnnnnnnnnnnnnnnnnnnnnnnnnnnnnnnnnnnnnnnnnnnnnnnnnnnnnnnnnnnnnnnnnnnnnnnnnnnnnnnnnnnnnnnnnnnnnnnnnnnnnnnnnnnnnnnnnnnnnnnnnnnnnnnnnnnnnnnnnnnnnnnnnnnnnnnnnnnnnnnnnnnnnnnnnnnnnnnnnnnnnnnnnnnnnnnnnnnnnnnnnnnnnnnnnnnnnnnnnnnnnnnnnnnnnnnnnnnnnnnnnnnnnnnnnnnnnnnnnnnnnnnnnnnnnnnnnnnnnnnnnnnnnnnnnnnnnnnnnnnnnnnnnnnnnnnnnnnnnnnnnnnnnnnnnnnnnnnnnnnnnnnnnnnnnnnnnnnnnnnnnnnnnnnnnnnnnnnnnnnnnnnnnnnnnnnnnnnnnnnnnnnnnnnnnnnnnnnnnnnnnnnnnnnnnnnnnnnnnnnnnnnnnnnnnnnnnnnnnnnnnnnnnnnnnnnnnnnnnnnnnnnnnnnnnnnnnnnnnnnnnnnnnnnnnnnnnnnnnnnnnnnnnnnnnnnnnnnnnnnnnnnnnnnnnnnnnnnnnnnnnnnnnnnnnnnnnnnnnnnnnnnnnnnnnnnnnnnnnnnnnnnnnnnnnnnnnnnnnnnnnnnnnnnnnnnnnnnnnnnnnnnnnnnnnnnnnnnnnnnnnnnnnnnnnnnnnnnnnnnnnnnnnnnnnnnnnnnnnnnnnnnnnnnnnnnnnnnnnnnnnnnnnnnnnnnnnnnnnnnnnnnnnnnnnnnnnnnnnnnnnnnnnnnnnnnnnnnnnnnnnnnnnnnnnnnnnnnnnnnnnnnnnnnnnnnnnnnnnnnnnnnnnnnnnnnnnnnnnnnnnnnnnnnnnnnnnnnnnnnnnnnnnnnnnnnnnnnnnnnnnnnnnnnnnnnnnnnnnnnnnnnnnnnnnnnnnnnnnnnnnnnnnnnnnnnnnnnnnnnnnnnnnnnnnnnnnnnnnnnnnnnnnnnnnnnnnnnnnnnnnnnnnnnnnnnnnnnnnnnnnnnnnnnnnnnnnnnnnnnnnnnnnnnnnnnnnnnnnnnnnnnnnnnnnnnnnnnnnnnnnnnnnnnnnnnnnnnnnnnnnnnnnnnnnnnnnnnnnnnnnnnnnnnnnnnnnnnnnnnnnnnnnnnnnnnnnnnnnnnnnnnnnnnnnnnnnnnnnnnnnnnnnnnnnnnnnnnnnnnnnnnnnnnnnnnnnnnnnnnnnnnnnnnnnnnnnnnnnnnnnnnnnnnnnnnnnnnnnnnnnnnnnnnnnnnnnnnnnnnnnnnnnnnnnnnnnnnnnnnnnnnnnnnnnnnnnnnnnnnnnnnnnnnnnnnnnnnnnnnnnnnnnnnnnnnnnnnnnnnnnnnnnnnnnnnnnnnnnnnnnnnnnnnnnnnnnnnnnnnnnnnnnnnnnnnnnnnnnnnnnnnnnnnnnnnnnnnnnnnnnnnnnnnnnnnnnnnnnnnnnnnnnnnnnnnnnnnnnnnnnnnnnnnnnnnnnnnnnnnnnnnnnnnnnnnnnnnnnnnnnnnnnnnnnnnnnnnnnnnnnnnnnnnnnnnnnnnnnnnnnnnnnnnnnnnnnnnnnnnnnnnnnnnnnnnnnnnnnnnnnnnnnnnnnnnnnnnnnnnnnnnnnnnnnnnnnnnnnnnnnnnnnnnnnnnnnnnnnnnnnnnnnnnnnnnnnnnnnnnnnnnnnnnnnnnnnnnnnnnnnnnnnnnnnnnnnnnnnnnnnnnnnnnnnnnnnnnnnnnnnnnnnnnnnnnnnnnnnnnnnnnnnnnnnnnnnnnnnnnnnnnnnnnnnnnnnnnnnnnnnnnnnnnnnnnnnnnnnnnnnnnnnnnnnnnnnnnnnnnnnnnnnnnnnnnnnnnnnnnnnnnnnnnnnnnnnnnnnnnnnnnnnnnnnnnnnnnnnnnnnnnnnnnnnnnnnnnnnnnnnnnnnnnnnnnnnnnnnnnnnnnnnnnnnnnnnnnnnnnnnnnnnnnnnnnnnnnnnnnnnnnnnnnnnnnnnnnnnnnnnnnnnnnnnnnnnnnnnnnnnnnnnnnnnnnnnnnnnnnnnnnnnnnnnnnnnnnnnnnnnnnnnnnnnnnnnnnnnnnnnnnnnnnnnnnnnnnnnnnnnnnnnnnnnnnnnnnnnnnnnnnnnnnnnnnnnnnnnnnnnnnnnnnnnnnnnnnnnnnnnnnnnnnnnnnnnnnnnnnnnnnnnnnnnnnnnnnnnnnnnnnnnnnnnnnnnnnnnnnnnnnnnnnnnnnnnnnnnnnnnnnnnnnnnnnnnnnnnnnnnnnnnnnnnnnnnnnnnnnnnnnnnnnnnnnnnnnnnnnnnnnnnnnnnnnnnnnnnnnnnnnnnnnnnnnnnnnnnnnnnnnnnnnnnnnnnnnnnnnnnnnnnnnnnnnnnnnnnnnnnnnnnnnnnnnnnnnnnnnnnnnnnnnnnnnnnnnnnnnnnnnnnnnnnnnnnnnnnnnnnnnnnnnnnnnnnnnnnnnnnnnnnnnnnnnnnnnnnnnnnnnnnnnnnnnnnnnnnnnnnnnnnnnnnnnnnnnnnnnnnnnnnnnnnnnnnnnnnnnnnnnnnnnnnnnnnnnnnnnnnnnnnnnnnnnnnnnnnnnnnnnnnnnnnnnnnnnnnnnnnnnnnnnnnnnnnnnnnnnnnnnnnnnnnnnnnnnnnnnnnnnnnnnnnnnnnnnnnnnnnnnnnnnnnnnnnnnnnnnnnnnnnnnnnnnnnnnnnnnnnnnnnnnnnnnnnnnnnnnnnnnnnnnnnnnnnnnnnnnnnnnnnnnnnnnnnnnnnnnnnnnnnnnnnnnnnnnnnnnnnnnnnnnnnnnnnnnnnnnnnnnnnnnnnnnnnnnnnnnnnnnnnnnnnnnnnnnnnnnnnnnnnnnnnnnnnnnnnnnnnnnnnnnnnnnnnnnnnnnnnnnnnnnnnnnnnnnnnnnnnnnnnnnnnnnnnnnnnnnnnnnnnnnnnnnnnnnnnnnnnnnnnnnnnnnnnnnnnnnnnnnnnnnnnnnnnnnnnnnnnnnnnnnnnnnnnnnnnnnnnnnnnnnnnnnnnnnnnnnnnnnnnnnnnnnnnnnnnnnnnnnnnnnnnnnnnnnnnnnnnnnnnnnnnnnnnnnnnnnnnnnnnnnnnnnnnnnnnnnnnnnnnnnnnnnnnnnnnnnnnnnnnnnnnnnnnnnnnnnnnnnnnnnnnnnnnnnnnnnnnnnnnnnnnnnnnnnnnnnnnnnnnnnnnnnnnnnnnnnnnnnnnnnnnnnnnnnnnnnnnnnnnnnnnnnnnnnnnnnnnnnnnnnnnnnnnnnnnnnnnnnnnnnnnnnnnnnnnnnnnnnnnnnnnnnnnnnnnnnnnnnnnnnnnnnnnnnnnnnnnnnnnnnnnnnnnnnnnnnnnnnnnnnnnnnnnnnnnnnnnnnnnnnnnnnnnnnnnnnnnnnnnnnnnnnnnnnnnnnnnnnnnnnnnnnnnnnnnnnnnnnnnnnnnnnnnnnnnnnnnnnnnnnnnnnnnnnnnnnnnnnnnnnnnnnnnnnnnnnnnnnnnnnnnnnnnnnnnnnnnnnnnnnnnnnnnnnnnnnnnnnnnnnnnnnnnnnnnnnnnnnnnnnnnnnnnnnnnnnnnnnnnnnnnnnnnnnnnnnnnnnnnnnnnnnnnnnnnnnnnnnnnnnnnnnnnnnnnnnnnnnnnnnnnnnnnnnnnnnnnnnnnnnnnnnnnnnnnnnnnnnnnnnnnnnnnnnnnnnnnnnnnnnnnnnnnnnnnnnnnnnnnnnnnnnnnnnnnnnnnnnnnnnnnnnnnnnnnnnnnnnnnnnnnnnnnnnnnnnnnnnnnnnnnnnnnnnnnnnnnnnnnnnnnnnnnnnnnnnnnnnnnnnnnnnnnnnnnnnnnnnnnnnnnnnnnnnnnnnnnnnnnnnnnnnnnnnnnnnnnnnnnnnnnnnnnnnnnnnnnnnnnnnnnnnnnnnnnnnnnnnnnnnnnnnnnnnnnnnnnnnnnnnnnnnnnnnnnnnnnnnnnnnnnnnnnnnnnnnnnnnnnnnnnnnnnnnnnnnnnnnnnnnnnnnnnnnnnnnnnnnnnnnnnnnnnnnnnnnnnnnnnnnnnnnnnnnnnnnnnnnnnnnnnnnnnnnnnnnnnnnnnnnnnnnnnnnnnnnnnnnnnnnnnnnnnnnnnnnnnnnnnnnnnnnnnnnnnnnnnnnnnnnnnnnnnnnnnnnnnnnnnnnnnnnnnnnnnnnnnnnnnnnnnnnnnnnnnnnnnnnnnnnnnnnnnnnnnnnnnnnnnnnnnnnnnnnnnnnnnnnnnnnnnnnnnnnnnnnnnnnnnnnnnnnnnnnnnnnnnnnnnnnnnnnnnnnnnnnnnnnnnnnnnnnnnnnnnnnnnnnnnnnnnnnnnnnnnnnnnnnnnnnnnnnnnnnnnnnnnnnnnnnnnnnnnnnnnnnnnnnnnnnnnnnnnnnnnnnnnnnnnnnnnnnnnnnnnnnnnnnnnnnnnnnnnnnnnnnnnnnnnnnnnnnnnnnnnnnnnnnnnnnnnnnnnnnnnnnnnnnnnnnnnnnnnnnnnnnnnnnnnnnnnnnnnnnnnnnnnnnnnnnnnnnnnnnnnnnnnnnnnnnnnnnnnnnnnnnnnnnnnnnnnnnnnnnnnnnnnnnnnnnnnnnnnnnnnnnnnnnnnnnnnnnnnnnnnnnnnnnnnnnnnnnnnnnnnnnnnnnnnnnnnnnnnnnnnnnnnnnnnnnnnnnnnnnnnnnnnnnnnnnnnnnnnnnnnnnnnnnnnnnnnnnnnnnnnnnnnnnnnnnnnnnnnnnnnnnnnnnnnnnnnnnnnnnnnnnnnnnnnnnnnnnnnnnnnnnnnnnnnnnnnnnnnnnnnnnnnnnnnnnnnnnnnnnnnnnnnnnnnnnnnnnnnnnnnnnnnnnnnnnnnnnnnnnnnnnnnnnnnnnnnnnnnnnnnnnnnnnnnnnnnnnnnnnnnnnnnnnnnnnnnnnnnnnnnnnnnnnnnnnnnnnnnnnnnnnnnnnnnnnnnnnnnnnnnnnnnnnnnnnnnnnnnnnnnnnnnnnnnnnnnnnnnnnnnnnnnnnnnnnnnnnnnnnnnnnnnnnnnnnnnnnnnnnnnnnnnnnnnnnnnnnnnnnnnnnnnnnnnnnnnnnnnnnnnnnnnnnnnnnnnnnnnnnnnnnnnnnnnnnnnnnnnnnnnnnnnnnnnnnnnnnnnnnnnnnnnnnnnnnnnnnnnnnnnnnnnnnnnnnnnnnnnnnnnnnnnnnnnnnnnnnnnnnnnnnnnnnnnnnnnnnnnnnnnnnnnnnnnnnnnnnnnnnnnnnnnnnnnnnnnnnnnnnnnnnnnnnnnnnnnnnnnnnnnnnnnnnnnnnnnnnnnnnnnnnnnnnnnnnnnnnnnnnnnnnnnnnnnnnnnnnnnnnnnnnnnnnnnnnnnnnnnnnnnnnnnnnnnnnnnnnnnnnnnnnnnnnnnnnnnnnnnnnnnnnnnnnnnnnnnnnnnnnnnnnnnnnnnnnnnnnnnnnnnnnnnnnnnnnnnnnnnnnnnnnnnnnnnnnnnnnnnnnnnnnnnnnnnnnnnnnnnnnnnnnnnnnnnnnnnnnnnnnnnnnnnnnnnnnnnnnnnnnnnnnnnnnnnnnnnnnnnnnnnnnnnnnnnnnnnnnnnnnnnnnnnnnnnnnnnnnnnnnnnnnnnnnnnnnnnnnnnnnnnnnnnnnnnnnnnnnnnnnnnnnnnnnnnnnnnnnnnnnnnnnnnnnnntcttatgacattgggttccaatttaaaattctgtgagcagttctggtaaatactggtttataatgatgttgatgttgactggtcgtgctgatttacttggatctctgctattcatgtagaattcaaatgtaggatacttaggacacttaaagcaataccgaaagaggtatccttcagtgtatttcagagaggaatttgcttgtgtactacattcagaagtaattttgtattgtcttatctcttttaggaggagagcattcccattgctttatctggtagggatatcttagctagagcaaaaaatggaacaggcaagagcggtgcctacctcattcccttacttgaacggctagacctgaagaaggacaatatacaaggttagttgaataaaagtttgtttttaaactaaaaatgggagtttcagccttggagccatgtgtagaagatactctttttttagtcagaatttacattatctaaaatttgtattctttcttttcaggttttttctttttttagcctgatgatggtctttttattaaaaatgattcccagctttttagagatttctagttttaagagtattcttatatgatacacacttgtgacagcattccagtgagacaggaaaaataagtattagtgccctataggtaggaaagctgaggctgggcacggtgcctcacagcctgtaatcccagcactttgggaggtcaaagtgggtggatcacctgaggccagatatttaagaccagcctggccaacattgcgaaaccctgtctctactaaaaatgcaaaaattagctgggcatggtggcgcacaactgtaatcccagctactcagaagtctgaggcacgagagtcactggaacccaggaggtggaggttgcagtgagccaagattgtgccactgcactccagcctgggtgacagagtgagactctcaactcaaaaaaaaaaaaaaaaaaaaaaaaggcggctgaggtcatgagaagttaaattagttgacattgctacttataaactatggaactatttcttgtggcagatgagtgttaacagaattccttgtagaaacatgaacttctgtttaaaggctgtggattttgggattttaagagcctaggcagtggggaataaaaaattttcatagttatattcaatgtaagttaatggaattaagatttcatctctgaaactttacatttttagctttcgtgatctgtaattatcttttcttcccactttcatatgatgtaaatagagcctaggtagcaggagtttcctacctaggtattttacacagtgaatctgactcaaatgtagttggggcttttagaaatattgttaataaactttgagctaatagttgcgaactcaacatgctgaaagtttgtaattaagaacagtattggctgggtgtggtggctcacgcctgtaatcccagcacttcgggaggccgaggcaaggcagatcacctgaggtcaggagttcaagaccagcctcgctaacatggtaaaaccctgtctctactaaaaatacaaaaattagctgggtgtggtgacatgtgcctgtagtcccagctactcaaggaggctgaggcaggagaattgcttgaacctgggaggtggaggttgcagtcggccaagatcatgtcactgcactccagcctgggtaacagagcgagactctgtctcaaaacgaagaagcagcagcagcagaaggccaggtgcagtgactcacacctgtaatcccagcactttgggaggccaaggcaggaggattgcttgaggtcaggggtttgagaccagctgggccaacatgatgaaaccccgtctctactaaaaatacaaaaaattagctgggtgtggtggcggttactcagtaggctgaggcaggagaattgcttgaacctgggaggcagaggttgcagtgggccgagatggcagccactgcacttcagcctggacaacagagcaagactccatctcaaaaaaaagaagaggaagagtttaatatttatataatagtattgctgagggagagtctaaatctgggacactataataggttctcttttcataaagagatttgtacatttgagttttcataatgtcctgtgtaatgattcaactttttatttttatttcttaatttttttggcgggggagacagagtcttgctgtgtcacccattctggagtgtggtgtcatgatcatagcttaatgcagtcttaatctcccaggctgatgtgatcctcctgcctcagcctccccagaagctgagactataggcacatgccaccattcccagctaatttttttcatttttttttttagtagagatggggtcttgctatgttgcccaggctggtcttaaactcctgagctcaaacgatcctcctgcctcagcctccaaaagtgctgggattctaggcatgagttactcactgtgctgcccagcccaattttttaatacatctcggtatctagattataaggggcagtgtttcttttctttttttttatttgagacggagtttcgctcttgttgcctggactggagtgcagtggcacaatctcggctcaccacaatctctgcctctcgggttcaagcgattcttctgcctcagcctcccaagtagctgggattacaggcatgtgccacccacgcccagctaattttgtatttttagtagagatagggtcaggctggtctcaaactcccggcctcaggtgatccacccaccttggcctcccaaagtgctgggattataggtaggtgtgagccaccgtgcctggcctttttttttttctttctttcttttgagactgagtctcactctgtcgcccaggctggagtgcagtggcgcgatcttgcctcactgcagcctctgcctccgggttcaagtgattctcctgcctcagcctcctgagtaggtgggactacaggtgcgtgccaccacgcctggataatttttgtatttttagtacagatggggtttcaccatgttggtcaggctgctctcgaactcctgacctcaggtgatctgcccaccttggcctcccagagtgctgggattacaggcgtgagccactgcatcataaggtgcagttacaggtgtgagccactgcatcataaggcgcagtatttctatagcttcttaaattttgtaaataatgatgtatagcatgttctcccacctcaccccatattttcttatatattccttgatactgtttcagcaatggtgattgttcccactagagaacttgctctacaggtcagtcaaatttgcatccaggtcagcaaacacatgggaggggccaaagtgatggcaaccacaggaggaaccaatttacgagatgacataatgaggcttgatgatacaggtaagaaatgattactaaaaggtagtgtagctctctgttattttagtcacaagtatttcagtaaattattaaaaattgtttttaagaattaaggaacagaaatactgcagtaagaaaaggaaatgaccactgcattcaagcgaaaaagacaaattaccataattgaaaacgatatttgactttattagtaattgtaaaacagcaagtttataataattttacctgtttaattggtaaagctaaaagtattagtagacgataatgtgagtttgtggacaaataggctacattgtaaatgtgggggtgtaaacttacatctctatcatgggcaatttgggagtatattttaaaattataaatgtatatataatgtgtgtgtgtgtgtgtatattttttttttttttggagatggagtcttgctctgttgcccaggctggagtgcagaggcgcaatcttgactcactgcaatctccgcctcccaggttcaggccattctcctgtctcagtctcctgaatagctgggattacaggctcccgctaccacgccaggctaaatttttgtgtttttagtagagacggggtttcaccgtattagccaggatggtctcgatctcctgacctcgtgatccacctgcctcagcctcccaaagtgctgggattacaggcgtgagccaccgtgcccggccataaatgtatatttttaagaatctttcctgaagaaaaaagttgggtaaatgcagggctgtaggtacaaagttgtttgctgtggggtggtttgtcgtgccgaaaaattggaccaacttagaaggagattggctaactaaatacgttaaggtataatctgaataggattctacatagtcattaaagagtaaagttgacctgtattcattttcatgaagaggtttcatgatacattgccgagtggaaaaaggtaacaaaacagcaagaatgagatcactcatataaaattatatcttgattttagttagaatattatatatgataattatgtgatacattctttgtattgcataggtttttaaaaaattatcttgtttgatccttttaacaatactcggctcactgctctagattagaggcattgctcttatgtcagaagtctggtgtgccttctgctattaattgagaattatcctaagacaagaaagtatgcctactgttgaaagcagcaggtgatttaggaagctgtaccccacccaatgtagaggtgaaacaaatattttttaagcatcctgtggtgaaatggaagtctttatcctaaaacacatctttgtgcctttttgtgttatttccacctctataacacaatgtgtttcttctctttctttcttttttttttttttttaatttgagacacagtcttactctgttgctctggctagagtgcagtggtgtgatctcggctcactgcaacgtctgcctcctgggttcaagcgattctcctacctcagcctcctgagtagctgggattacaggctcccaccaccacacccagctaatttttgtatttttagtagagacagggtttcaccgtgttggccaggctggtctcgaactcctgacctcatgtgatccacccacctcggcctcccaaagtactgggattacagggatgagctactgcacccggcctagttgtttctaataaaagatagtcatgtgctgcataacaatgttgtggtcagtgacggactgcacgtatgtcggtgttcccataagattataatggagctatacaatggagtaggctataccatcacatagcaatgcatttctcagaattatcattaagcagctcaggactgtaatattataaacctttatcctctttgctcaaattaaaattaatgagaatgtatgttttctaaatcttgcatagtgcacgtggtgattgctacccctgggagaatcctggatcttattaagaaaggagtagcaaaggttgatcatgtccagatgatagtattggatgaggtaatgtctcttcatttggcattatactgttctgtacttttctgtgctttgcttataactgccagtgaatgaagcaaaagctgcttgtgtttatgatctaataaacacataaacaatcagtttaaattaatttgcttataaaatgtgttttacccgtcagagggagtagattataggcattcattggaattcagcattttgtctttttcttagagatagcagacattaggttttaattttttagtagaggagtgaataacctcaatgccaaatttattctaagtctctttctgctctgtgattaatttttaaaagcatataatatatattgtctcttctcattttgtgcatactactttgtactgtttggtttttaatctctgttacatgtattatctcaccatgttataaatgccttttaaaaacttattaaaatctgtagtcctgggatctagccatgttttgtacatgtacagatggtccctgacttaagatggttcactttacagtttttcagtggaagtgataagctttcattagaaactgtactttgaatttttaagattgatatttttcctggttagtaatatgctatatgatactcccatgatgctgggcatcagcagcaaactgcagctcccagtcagccacatgatgattgagggcagacagccgatactctacagtatacggcgttgtcaggtgattttgcccaactgtaagctaaggtaagtggagcatgtttaaaggaggctaggctgagcgatgatgttcagtaggtttgggtaatattttcaacttaggatgaatttatcagaacataatcccattgtaagtcaaggaggatctatagtgtatcagcgttgttaatgttttgacatgaggttattttcacatttggtttgtgttttattattattattatttttttttttttttttgagacagactcactctgtcacccagactggagtgcagtggcgtgatctcggctcactacaacctctgcctccccgcttcaagtgattctcatgcctcagccttctgagtagctgagattacaattatgtaccacccacgctcagctaattcttgtatttttagtagaggcgcggttttgcaatgttggccaggctagtctcgaactcctgacctcaggtgatcctactgcctcagcctcccaaattgctgggattacaggcatgagccaccacgcccggcctggtttgtgttttaggtaacatgatttaattcaaatcagacttttatctttaagtaatgagagagaacatttattaatcactgggtaccagcactaagtgctttacatggtttgttttttttttttttttccatttaatttttacaagaaacctataaggtaggtatcctgtcaagtaattactatagtatgtagacatccaacttctaatttgcttataaaatacgttttatacttcagatgcaatagataggcattcataggaattcagctttttgtcttatagatgccagagtttaggtttaatttttaagaagaggagtggctggataacttgaaagtcaagttttttcttttttgttttgttttgttttgtttttgagacagagtctcgttgccccgcttggagtgcagtggtgcgatctcagctcaccgcaacctccacctcccaagttcaagcgattctcctgcctcagcctcccgagtagctgggattacaggcatgtgccaccatgccgggctaattttgtacttttagcagagacagggtttctccatgttggtcaggctggtctcaaactcccgacctcaagtgatctgcccacctaagcctcccagagtgctgggattacaggcgtgagccaccacacctggccttagccaagttttttctaaatcccggtaaagtagttactacattatgtaaacatccaaattttaatagttttacaattttagagttgtggaaactgaagtacagagtagttctgtaacattcccacacagctgagaaatgaaggaggcaagatttcaacctggcagtttagctccagaacctgtacttttttttgagacagagtcttgctctgttgcccaggctggagtgcagtggtgcgatctcagctcaactgcaacctccatctcccaggttcaagcagttcttctgcctcagcctcctgagtagttggaattacaggcgcttgccactgtgcacagctaatttttgtatttttagtagagacagggtttcaccatatcaaccagtcatgtcttgaactcctgacctcaggtgatccgcccgcctggtcctcccaaagtgctgggattacaggcgtgagccactgcacccggcctcagaacccttactttttttttttttttttttttgagacggagtagtctcgccctgtcgcctaggctggagtgcagtggtgtgatcttggctcactgcagcgtccgcctcccaagttcaagcgattctcctgccccagcctcccgagtacctgggattataggtgcgtaccaccacgtccagctaatttttgtatttttagtagagatggggtttcaccatgttggtcaggctggtctcaaactcttgacctcgtgattctcccgcctcggcctcccagagtgctgggattacaggcgtgagccaccgcgcccggccagaacccgtacttttaaacactacaccatactacctctttaatgagaatcatcacattaaaattctgttgtggagctgggcatggaggtatgtgcctgtagtcctagctactcagtaggctcaggcaagaggatcacttgagcccaggaagttcaggctgcagtgagatacgattatgccactgcactccagctgggtgacagagtgaaatgctgtctctaaaaataaataaattaattaaattctgttacagaaagcgggggaggttgtctgtgtagtgtagaattttttttttcccctagaagatggggattatagattttgcccccttctgcatatttgactctctgcagtgttggagagaatttattgttttccaccaggaacatttcatggatgcttttgttggatgatgccttattctttgaccatgtattaaccaagaccttagacattattttattgtttttaaaattgtcttttctttctactgcaggcagataagttgctgtcacaggattttgtgcagataatggaggatattattctcacgctacctaaaaacaggcagattttactatattccgctactttccctcttagtgtacagaagttcatggtgagtataaatctgtacttggaatcagtgccatcctgtgacctttgagtatgcttttatttgtaattacatcttcatatctgtgaatatactttatgctaattatttcaagcctttggctctttcttcagttgatcaattaaagatttgttttacgtaaattaactgactttttaagaaggttgtaatagtaacttaattaaattcctcatctttcacttagtttttggtgtcatgatgacatagccattggtgctagctgaattgattccggtattattctatatacaaaacagagcttgagtatcctaaactgaaatccaaaatactgcagaatttgaaaccttttgagccacgaacatgatgctaaaaggaaatgttctttggattttgaattttcaaattaaggatgctcagtcactaagtgtaatgcacatattccaaaattagaaaaaatttaaaacctgaaacacttctgttcctaagcattttgggtaaggaatactcaacctgtagtaacttagctgcatttttgagatcttatatcttaatttatttctatcgggtcgggcatggtggctcatgcctgtaatcccagcactttggggggccgaggcgggcagatcacaaggtcaggagttcgagaccagcctgggcaacatggtgaaaccccgtctctactaaaaatacaaaaattagtctgttatggcagtgcatgcctgcattcccagctactcgggaggccgaggcaggagaatcacttgaacccgggaggtggaggttgcagggagcagagatcgtgccactacactccagcctgggtgacagagcaagattttgtctcagggtggcaggggggaaattctgtaatgacagatcatatattttgttttgaagagagttgcgtcccttacagcaagagtttatcggacagaaacgtatagggtatattttgaatttgagatgaactctgctttcatttaagacgacgactcatctttttcccgctccccccccagaattcccatttgcagaaaccctatgagattaacctgatggaggaactaactctgaagggagtaacccagtactacgcatatgtaactgagcgccaaaaagtacactgcctcaacacacttttctccagggtaagaagtaggcttctgctgttgaatattatctctcgagtcccagtaaaacagatgatttcatcaattttcccaccgtcttcactgtataaaagttcgtagtgtttctggcttggcacggtggctcatgcctcccagcactttggaggctgaggcaggcagatcacgaggtcaggagtttgagaccagcctggccaacatggtgaaaccccatctctactacaaaatacaaaaaaattgggcatggtggcgtgtgcccataatcccagctacttgggaggccgaggcaggagaattgcttgaacccaggaggcggaggctgcagtgagctgagattgcgccattgcactccagctctgggcgacagagcaagactccgtcttgggaagaaaaaaaaaaagattaaaaaataattcatagtgtttcctaaaaggcaggtttagttgttgacttaaagttgatactaaatgattaaccaagtcacagatacacttttgaatagtttctgaaatactttgaccttaactagggttaatcctcattattcacatattctgtatttgtgaatttgcttagtcactagaatttatttgtaactccggaattaatactcaaggtagttcagcagtcatttgtggacgtgtacagtgtggcaaagagtttaagtcacctgacatgcacattcccagctgaggtcgaagaaagcaatctctgtcctcttgtttagctctcatactgtgaacaagggtccttttcacagtctgccatgtttttcaagtttttgttgctgatttcacagttttaattggcccctacacatggtgctgaagtgctgcccaatgctggtggcattggttgtgagtatattaaagaaggtattcttggctgggcacagtagctcatacctgtaatcccagcactttgggaagccgaagtgggcagatcacctgaggtcaagagttcaagaccagcctgaccaacaggctgaaaccctgtctctactaaaaatacaaaagttagccaggcattgtggtgggtgcctgtaatcccagctactcaagaggctgaggctggagaattgtttgaacccaggaggcagctgttgcagtgagctgagattgcaccattgcactccagcctggacaacaagagtgaaactccatttcacaaaaaaaaaataaaataaaatatttttaaatggaaacacataaaacataactactttgaatcagataatcaattgtattactcttgttgacagttatgtggcccttaagaaatatactctaatacggtaaatcttagatattattatcttccatctattatttacaatttttacaatttaccatctctctcatatcatgagattctaagttttagaccatgttaatgtttcttttttgctggttcgtgttttcaagatttggcaaaccaaatgaaggttttttttatttttctcatacttatttttttctgtgctcagcttcagataaaccagtcgatcattttctgtaactcctctcagcgagttgaattgctagccaagaagatttctcaactgggttattcttgcttctatattcatgctaaaatgaggcaggtgagtataaaactagaacttgcacaaatttaataagaaatctctttctttattttgttttaatgttcttttaaatgtcctgagtttaagaataaactgttccttagtagccaaaggacctttcattttgacctccctcaggttcaattttctagcaataaaatagggataatagtacatattcataacttacaaggttgttaggaaaattaagataaatgtttaaatgagtactttggaagctgtcaggcatgatacaaatgtaaaattttattcttcccttcctttccatgtttaattctctgtttaatacagtaaatagccacatgtggcaatttaaatcagttaaaattaaaataaaaagtcagtttctcaatcacagccacatttcaagtgctcagttaggcacctgttgctactggatagtgtattggaattggaagtacagacacaaatatttcctttattatagaagttttactggacagcactgctctggatttttaaatatggcccctcagctggctgatttttctttttttctttactgtttgcctttagaaaaagatacaatatctaaatttcagaatttgatttagcaaaaaataatttaaaactgtaacaaaaatgacttttttgttaactacattatgaaatttcgtaagtaaacagtttctgtagacgaagatatcaagaacttaactcatttggttttgaaagcagcttaatatcatggatcacttataaacagattttgggtagaactgatcgtctgggagaaataattatgggaaatttggggctgtatatgagtgttaatcaaatggaatacattgctttctcctaggaacatcgaaatcgtgtatttcatgatttccgaaatggcttatgccgcaatcttgtttgcactggtaagtatttttgtatttcctttacccagtgtttttctcccaagttgttttttgctttctctgttcatattacatagtgcaacctgtgacatagtccgacacaccctaccactacttctaggatttctgaagttgaaaatgaactcttgtcagctcctgatactgggttccatatctgaaactttagaagacttactctggcactcatacctcatctctgtcttttttttggggggggggagggggatggaatctttgtcacccaggctggagtgcagtggtgcgatcttggctctctgaaacctccacctcctgggttcaagtgattctcctgcctcagcctcccaagtagctgggattgtgggcgcctgctaccgcttagcccggctaatttttgtatttttggtagagacagggatttcaccatgttggccaggctggtctcgaactcctggcctcaggtgatcttcctgctttggtctcccaaagtgctgggattacaggcttgagtgcacccagcctcttttagacacattttttaaaacttgcttacaattactggaaaaaagtaacttgggagcagaaagttatttatgataatgtgattatgaaaggtaatgccagtaatgtgcaaatgcatttgaataactgaattaaattaataaacttaggttatgctagaaatatgtgttagtattgtactgagagacatttctaaattgaaaaaatgaaaattatctttttttttttaagatctgtttacccgaggtattgatatacaagctgtgaatgtggtaataaactttgatttcccaaagctggcagagacctatctccatcgtattggaagatcaggtgaggaaaaaagaggtgatattcttggtagaagttcttttttgaggcgtgtaatgactaaattttgttcttttgtgaaatagagtacagtagctatgagaacagtgaattaacagtaattcagttgtttggtatttaagactaatttctaattcttctgtagcatttattaagaaaagttaaaataactgcttaatttgagatgaaattaacacatgagaacttcactcattaggtggtatgttctgtgactgttgtttaatgtgtattttatggcagttttgactgccattttgtcatttgagaaaggtgaaatgaagtactattttgggctgcgaaacctgaagttgtagggaaacctgtgtttgaagaccattaagaagttgttttgcatactaagaatggcactgaacatcattatcaatcctgtgtggttttgccactgcttgacttgcacaattcacattgattttcatattttattcattaaaatttttaaacacatgttttttaggtcgctttggtcatcttggcttagccatcaacttgatcacatatgatgatcgcttcaacctgaaaagtattgaggagcagctgggaacagaaattaaacctattccgagcaacattgataagagcctgtatgtggcagaataccacagcgagcctgtagaagatgagaaaccttaacaagcatgtacgtccctgacagaacagctaagaggaacctttaaatgagggaaatcaaaatcttctttcctgggggaaatttgatgtcacaccatatataatagcaataaagggtaaaatacccactagcataaatgacagtaaataatatctcttgtgggaggttgtagtctcattcgagaatctgtaaatgttgttcttgaatgcagcttcccgggtaatgtggtagattagcagtacttaaattcagagtcctaaaataatgaaagcaaaaaagaatgtttttcagcaatttgtttttctttttgagacaaggtctcactgtcatccaggctggagtgcagtggtgcaatcatagctcactgcagcctggttctcctgggctcctgagtagctggaactgtaggcacatgccaccacgcctgcctaatgttttaaatttttggtagaaacaaggtcttgctttgttgcctaggctggtccagaactcctgaactccagcagtcctcctgccttggcttcccaaagtgttaggattataggcgcaagccactgtgccactgtgcctggccttttttgacagttttgtaggggggatttttgttgtttttgttttttgagagtcttgctctgttgcccaggctggagtacagtggcacaatcacggcccactgcaacctctgcctcccaggttcaagcgattctggtgcacctcagcctcccaagtagctggaattacaggcatgctccaccatgcccagctaatttttgtattttttagtagagttggagtttcaccatgttggccaggttggtcttgaactcctgacctcaagtgatctacccgcctcagcctcctaaagggaggctgggattacaggtgtgagccaccacactgccagcagttttgaatatgaaagtatttacatttctgaaaatgtaaaatgtttttagcatttactcttaatttctagtaagtacattaatcactctgataaaactatccataataccttattagcaaatgtttaatcagattatgaggatggccatctttttaaaatacccactctgggccgggtgcggtggctcacacctgtaatcccagtactttgggaggccgaggtgggcggatcacgaggtcaagagatcgagaccatcctggccaacgtggtgaaaccctgtctctactaaaaatacaaaaattagccgggcatggtgacacgcacctgtagtcccagctactcgggaggctgaggcaggcgaatcacttgaacctgggaggtggaggttacagtgagctgagaccgcaccactgcactccagcctgggtgacaaagctagactccatctcaaaaaaaaaaaaaaaaaaaagccacttgggctggctcagtggctcacacctgtaatcccagcactttgggaggccgaggtgggtggattacctgaggtcaggacttcaagaccagcctggccaacctggtgagaccccgtgtccactaaagatacagaaaattagccaggcatggtggcgggcgcctgtaatcccagctagtcaggaggctgaggcaggagaatctcttgaacctgggaggcagaggttgcagtgagccgaggtcatgccattgcactcgagcctgggcgataagagtgaaactctgcctcatatataaataacccactctgatttcctaggtaataagagtgaaactccgtcaaatacataaataaaatacccactctgatttcctggacaacctgtcttcccatcttttttttatttttattaagatgggatctcactatgttgccccggctggtttcaaactcctgggttcaaatgatcctcccactttggcttcccagagtgctgggattataggtgtgagccaccacgccctgcctctatcatcttttggtgactattgggctctagttagaaatgcatgaaacaaggctcagctttaagcaaggtaggttgtttcagtatttcctaaagaaaatctgatttgacaaaggatagtttccaagttataggtgaacatcttacctatttaagtaacctaatgttacttaaattttttttctctttcttttttaaatagagacgaggatttaccatgttggccaggctggtctcaaactcctgacctcaggtgatccgcccacctcagcctcccagagtgctgagattactggcaggagccacctcacccaaccaattgttacttaaataatttttaaattactctgtactctttttttccttaagttaaacatcaaacacaaactcttggacaagcatgaaactagccaatgtttgctagtactttggcagagtattcagtttgtgtaaggttaatttttttcccccggatttgttacgagtgagggctgcctgctatcagaacattcacattcattcaggcccccaatctatctcagggttgcctaccagaaattatttaatcctataaccagtagattctatagtaggcacagggttagtagaaactactagaaaagagcatttgggatgaggattgtgaaaacctatgtatcctagtttgtgttgctttcagaatgttaattttgtattctcttcttctgtaggctttgacaaattacaaaaggctcgtttggatctgtgacacatcgttttggggggaatgctcttctctttgtgggtttttcatcttttattttggaactatgaagacttaaaagagctcagacattttctttttttaactggtgaagagaaaaaggctgaaaagaaggaatataccttttttgttccacttgtttgcactgtgtgctgactgaacattagttgcactaactgctggtttttaaaaaatgttttctggggaaaggggacaaggaaggaaaagaaagaagagaaggggagaaaccctaaaaagagaagaatcttaatgaacacacaagcttgtcaatgatttcaaaattctccaacagctgactctcgtgcatttcaacttctccctgattcctcatccgttttttaagcctgaagagcttattacttatttgtgcgaagtgccttatgctatgagaccattcagaatatcatcttttagacacagcccgaggaatcaacaatagtaactctttctttccgtttttttttctttttcttttaaaaaatgtctttttattttggtttcaggttgaagtctcttccctttctacccagtactcgagcccagggctagaagttgaaactcactagtaatgttaaacaccattttttttttctttttggggaggagttgatatgcaactgcagttcatccgcactgtaaatacatgtatttaaaaaaacaatcccaagtaaaaatttcttctgggctgagtagataaaaaacatcatcgctcccaaaggaaagagcagtctatcattgcaggagccatatgacaagcctttgtgctctatagcagacactaaagactgggttacatatgcctccagtagtagtatggcacttgatgtgtagacatgtcagagccttggccctctttcctctgtggcaaagcgtgtcccatagaaaattgggtgtgtatacttgtataaactttgtaaataagttttttttctgggttcatatatatatatatatatatacatatatatatatttttttttggatgaaggttgctgggattaaggggattagagtgattatgggagcagctaaagatgagaggggctcagttttacgcaacactaaattctagaaagtactttggcctcgtgctgtagagagcagatttctatggtaccctgtgttagtaaaggggcccagaaatctgggatgtactgtttgctgccacactgtctcatctagtacctttggagtaggtttaccagagagagcaaggaagcttcaaaacattgataattcaagatttattttgagaagctctgattttgcttcttccccctttctaaaagtttgaggaatatttcaagctctgcaacagggggcaaagattaatctaccttgcagtgtaggaattctattgagtggcagtgtcattgagcagtatatatataaagcacagatttgcatttcagaatattagccagtaccagctttggtaatgttagcagttctggagcttaattttctgtggatcatttcctgtagtgtgtaaatgtgttgccctctgcccgctttgatacataaacttttgcaggaatgggcaacctgagagctgttaactttcatgctacagaaagctgcttgccattctcttgcattgtgacaagaattgttacctgtcattttgcactgtaaattgctggcagatgctttacagtcaatagtgttgctttaaattgtgcccctcccaacatgcttgatgtttggcctgatctccaggcaaaaggagtgagatgaatcaaaaccagtgaacttttttttttaatgtttttaattcccttttaacccagtgtactaggtcaatcaggaggcatctggaaagggggggaaaaaagcaaaaaacaaaattaaaaaaaattgatttccatattttatttttcaaaaccctaaaatattacaaaataagtcccgcatatactttaatgttttaactcttttggacaaaggaatcaattacttgaagttgcttttttgactctgcctacttctgagcaaactatttgcgactcacccacaattccttggagatcaaaatcctgcagatgcctcctgatgggacatagccctaactccttaacaactgtagcaagaactgcacggtacaaacccaaaaaagaacaagctcatctatttggaacccaagcctcatattttctgtccagtcaatgttggttactaaatagaaaacctaattaaggaagtaacttttttccagggaggggtgggagagggaatttaaaaggtgtcaacttttgaccaaaaaaattgtgcccttgtaccgatgcagctctctttctcccccacctcttgcgagataagagggatcattcatgtagaagaaaagagtataaatgcaattctgtatctcgctagagaacgtgtgggtgactaaacaaaaagtgcagtctccttcaccaactttagactgcgtggtgccacatgcctgtgggtccctcttaaagcacagacttaaaatggaaagtattactgaagtatagcctctaatgaggagtggcacttaaactatctgggacaccactactggacacggtcttgtagaggcagctgtccagttttggtgcttgactcttgaataggaattgttaaatggaaagatgctctgaggactaggtcaaagcctggtctttttttttttttttttttttttttctttcttttttgggccctcataataagcattgttactattggaagttgttttcacattctttccaatattaaatatgtatttttttaagtaatgataatattttccagtggctcatttggatgagaactaccctctatttttaatattaaaactacatccaactcatcatttagcctttggttgtacagttgtgtaatgggctatggactgttacacaccttaccacctctaggcctatgttttttctttccccatatattctgatggggataaatactgttttgcctctcccataggaatggaatacatttattctaaaatgatctttcacagaagtaagagagagggaaacctaaatatacctctaaattgtttgaagttggtcccagcagcataaaatgggttggccccaaagggttggagggtgggcttggttatcagtatttgttttcagaatgagatgggagcatctttcctttgccacgtgctttgtgcttgataacatcatgcttggttcaaacgacaactcagcacaaagccttgagtataaattgttggaatcaaaacatctcattctgatgacgtggtttaattttttaatttttttttttaataggggtgggagggagggtactttgccccaaaagggagggtgtctgcactaaggatttagaaacactttggaagctcataacctcatcagaaactgcctttagccacactcctgaccttctagatgagtaacaaaaaaatgaaataagttcttggaaattaagccatttattttaatttgctatttttttcaatgttctaggtatctttaaatttgttattgtggaatcattttcctgccagatacctttatcaaaattattggcctcatgagagctgaagtaagtcagctttttggtgaactttagtggacttctgtgagattgtagttgtactttgtatctctaaatctaaagatagttttttaaaactcccaaagaaaatctgctctcctttctgatctaaaaactcatctttggggtaaagagttaagtgtccaaaggttgtcacagttcatgaggtcagagggagctagcctggcacctggactctgcccatccacagctgacagattccaacagaagtgtatttaaattctccagtagacaatgctgggtaagggagggggtagggctgggttattaagatacaggctgctgtattttacattggttgtgggggaaggggagcctggagaaaacaaagtcactattcccttttttgaaacaggaaaaaaaattattttttgttcagtaaaaatggtagagaattccaatgtccctagccacaagggaccagttccactgagaagtgaacagtgggaactcaaaatttcagaaacattgggggaagggaaaattggctttctcttaattggcagatgttccagtggggcgggggggctctgtttttgttgggatgtgttatgttgtatgtacgcatatatggaccggagtctgctgagtttataaggttccaaaaatatggtaaaatcttggtttttgttaatttatctcaataaaagcccactggaactccaaatgtgtgtgtggtatgtccttagtagcagctgtgtgcataggaatctgagcattttgctcaggtaattcatactgtgaaacagacatttctcaacccatcattcctgtgaagcccagttgaattcagagccccttcatctgttgtagatactgttccaccatgctgtcagatttcacagcctaaatggagaaccaagataatcggttgggaagaggggagatgtggtccataatatgtccaaatacatcagtaattaccacctcctacaattgttctcaaatgtaaagctgaacatacccccaaaaccaaggcatactacatcttaacagtatgaatggaattcatatgctgagaactacaaaccactgatgaaataaaagattgggaaataaaagttgggaaaagcagacacttaaagttgagcacatcactctcactacctctctacccaaagaaatgcttaagtataactaagaaaatagagtcagtcccctgtatctgggttttacgtctgcacatttagtcaactgcagaccaaaagtgttaggcctgcaatggttgggtctgtactgagtatgtacagatttttcttgttctctgaactacagtataacaactatctacgtagcacttattgcactagatacgagtaatctggaaatgacaaagtgtgcaagatgatgtccagagattatacgcaaacactacatcattttatataagggacttgagcatctgagggtttgggtatttgcaagggagggtggaatcctggaaccaacccccatggataccaaggggcaaacaactgcaatacctatatgctggagctacaaaataaactgacagaaaaatcagacctagataaatggagatgccatggttcatggactggaagaataaatcttgagtttcaccaatttggtctagagggtcaatgcatttccagtcaatcccaataggcttttttgtaaatacccacaagctgattctataaaataacgtggaatgctgggtgtgttggcattcacctatagtcccagctattcaggaggataaaatgggaacatcagtggagcccaggggttccaggccagcctgggcaacatagacctctctaaagtagtaaaatttatatgggaaggcaaattatgctgtaacaattctgtaatgggaagaaattggaggagtcactacctgatttggactcaatataaagatgcagtaacgtattagcaaaaggatagacatgtattgatggaacagaatagccgaaaaatagacccacacaaatatagttgatttttgacagtgcaaaggccattcaatgaagaaaatagagtcttcaataagtgatattgaatatgttgcaaaaaatctttcacccattccttgtgccttctataaaaactcaaaatggatcatacggccaggcacagtggctcaggcctgtaatcccaatactttgggaggctaaggcaggcagataacttgaggccaagagttcaagaccaacctggccaacatcacaaaacaccacctctactgaatatataaaaattagctgggcgtggtggtgcatgcctgtagtcccagctacttaggaggctaaggcacaagaattgcttgaacccgggagagggcggttgcaatgagccaagattgcgccactgcactccagcctgggtgacagagcaagaccctatctcaaaaaacaaaagaaatggatcatagacctaaaagtagaacatgaaactataatttctggaagaaaacgagagaatccgtgacctgtttgggtttggcagaaagctgaacatgcgatgttatggagaagattgataagcagctgttaaaatcttcttatcaattaagtgagctgtggaggatatagaataagtagtaacttagaataataggaattagaatttagttcaagtaaattcagaagttaaggagaaagctgggcccagtggcacacgtagtcccagctactcagaaggttaagtctgggggatcgcttgagtacctgcagttcaaatccagtttgggcaacatagatcctgtgtgtgtgtgtgtgtgtgtgtgtgtgtgtgtgtgtgtgtctcaaaaaaaaatgttaaggagacttcaaagatttacagattgtacattggaaaagtacattggccagtcacagtggctcacacctgtaatcccaacattttgggaagccgaggtgggggtattacttgaggtcaggagtttgagaccagcctggccaacgtggtgacaccctgtctctacaaaaatgcaaaaattggccagatgcagtggctcatgcctgtaatcccagcactttggaaggccaaggcaggcagatcacgaggtcaggagttcgagaccagccagggcaacatagtgaaaccccgtctctactaaaaatacaaaaattagccgggcatggtggtgcatgcctgtaatcccagctactcgggaggctgaggcaggagaatcacttgaacctgggaggcggaggttgtggtgagccaagatcgtgccactgcactccagcctgggcannnnnnnnnnnnnnnnnnnnnnnnnnnnnnnnnnnnnnnnnnnnnnnnnnnnnnnnnnnnnnnnnnnnnnnnnnnnnnnnnnnnnnnnnnnnnnnnnnnnnnnnnnnnnnnnnnnnnnnnnnnnnnnnnnnnnnnnnnnnnnnnnnnnnnnnnnnnnnnnnnnnnnnnnnnnnnnnnnnnnnnnnnnnnnnnnnnnnnnnnnnnnnnnnnnnnnnnnnnnnnnnnnnnnnnncactccagcctgggcaacagaacgagactccgtctctaaaaaaaaaaaaaaaaagtacaaaaaaataagccaggcatggtggtgggcacctgtaatcccagctacttgggaggctgaggcagagaattgcttgaacccgggaggcggaggttgcagtgagccgagatcgtgccagtgcattccagcctggacgacagagcgagactccgtctcgagaaaaaaaaaaaaaaaaaagccgggcatggtggcatgcaccctgtaatttcagctgttcaggaggctgaggcaggagaatcacttgaacccaggagtcgaggttgtattgagccgagaccgtgccactgcactccagcctgggcagagtgagactgtctcaacaaaaaaagtcaagtcagataacctgtctccaaattcagttctttcactgcactaccctgtctataaaggaatgtggggggacatgtcttcaatcagaggagcaaagagaacggatatgaaaatcacttaacagtactgtacagtctggtctaaggtcagacttccttgtagactctgtgggaaagtattgattcttagattccccggttgtctttccattatctcattaatctaattacagaatagagagtgtagcaggtgcctacatcttcagggctgttctctaagctcactgtctccacagattggcccgtatgaaccacactaacattccctttggtccctggcttccatttgggtttgctcaccagggattccccccaggaaatcagtgggaaggaagacagtaaggtcctctaattccctaattagagtgtgtctgcctctaattccctccctgcaagattgtctctagctgcttcgtccttcagcgtgaggtctcttactgagtctgaatctacatgactcttgcctcattttctggtaactgttgcctccctttgttaagttctgctacataagtcctcttcaaattatgctattacaagtgcgccatctgtttctttttgggatccagactgatagagtaattggtaccagaagtggccctgggaaacagactcttaaaattagatctgggattgggttagtcatacttgaagagctcaataacctcctcatgggaggtggtggaggggaggccgggaatgggacatgagtgatccatggcatacagtggtgtcacaattcaaattttgactggtggtaccatgggatggagtgaggtaaagggcaaggcatggggaaagggagctgtgacaattatagtgacaataggccctcgagtgcatgcagaagaataagagaaataaaaattagggacatgccagctgggtgcggtggctcacacctgtaatcccaacattttgggaggctgaggcaggtggatcacctgaggtcaggagttcgagaccagcctggccaacatggtgaaacccccatctctactaaaaatacaaaaattagctgggcatggtggtgggcgcctgtaatccctcgctactctggaggctgaggcaggagaatcacttgaacccaggaggtggaggttgcagtgagctgaaatcgcaccattgcactctagtctgggtgacaagagcaagactgtcttaaaaaaaaaaaaaaagaaggaacatgcaattaacattcaaagagaaagagaaggcctccttgggagttttggtgaagggcccttatctgtagatatttttggtgttagctaattgattccactgtccctaggactgaaatagatggcagcctttgaaaatcaagttttacttgatttgtataaacagaaaagctctagatctgttgaagagaattctgacttgagctagtctgttgaactcccctcaacaaggccagttccttgaataaaagggaatctgaatctgggtcccccttctagccttttttttttttagacggagtctcgctctgttgccaggctggagtgcagtggcgcgatctgggctgactgcaacctctgcctcctgggttcaagcgattctcctgcctcagcctcccaagtagctgggaccacaggcacgtgccaccacacccggctcattttttgtacttttagtagagacggggtttcaccatgttggccaggatggtctcgaattccagacctcgtgatccgcccgcctcggcctcccaaagtgctgggattacaggcgtgagccaccaggcccggccttctagccttatcccaaaagggcttgtgactgtttaccagggagacaagggaagaggaaatagacgtttgaggactactgtagacccagaataatacggctcagagtaaagactatgctggtcaagtgatccatggagttttggcttgggcccatctcacagttggcctagtgggtccctgaacccaggtccacacagcatagtgggaatggacagcctcagcaactgacagaatccccaatttagttccctgacccatgaaataaggaatattatgacagaaaaggttaaatggaagacagcagaactgcctctttcaaaatagtaaaccaaaaacaacactgcattcctgaaaagactgaagcggttagtaccatcaacaaagacttagaaagtgccggatggtggttcctgccattactccactcaacgcacatattttgtttgttcagaagataaaggatcatcaagaacgacagtggattattgtaaacttaatcatgtggtgacttcagtgcaatctgctgtcccagatactgtgttctgtttgtctttttacggaagcaaatcaacatcccctgccacctggtatgtagctattgatgtagtgaacgtgctttttttttttttttttttttcccccagacctgatagtaaacactaccaaaagccattttctttcagctagcaggaccagcaatacaacttcgttgttgtatgtcagggctctattatccctctacgtagtgtgcagagaccttcatcacctctaaattctatggggtatcatgctgatccacggtatcatggacgtggtgagcaggatgtagcatctgccctggatactttagtaaaactcaagcctgccagaggatagaaaataaatccaacaaaaaatcatgaacctgcctcctcagtgaaattcctggggatccagtgggctgggccatgttgcaataatccctttctaggtaaaggataaattactgcattggcccctcctgccactcagaaagaggcacaatgcttagtaggcccctttggattctggaggtaatatatatttgggtgtggtacttcaacccatctgctgagaaatctgaattgttgccattttttagggtggcccagaacaagagaaggctctgaaacaggcccaggctgcattacaagtagctctgccacttgtgtcttatggtctggcagaagtgtctatggctgacaggaatgcttatatggaggctttgaaaggctttttcagatgtgtggtagcacagccctttaggaatgtaaagaaaagctatgccgccgtctacaggtaacattctcctttttttccccctttttaaatatataattattctttaacgtagtgatgggggcttgctatgttgctcaggttggtctcgaactcctgggctcaagtgatcctcccgtctcggcctcccaaagtgctgggattacaggcatgggccactgcacccagcttcattctgcttttgagaagcaacttctggctgggtatcaggccttattagagcctggactcttgactgagagttaccaggttaccatataactggagctgcccatcatgaactgggtgttgcttggcctatcaagttatagggcaactttgggctctcctggtccagaggtctgagctcctagaggaggaatacctctgtcagggaactcaacaatggttccattaaattgaaaattgagacagccacgtgcctattttgggctttttatgctaatgaaccaacaagcaaagcactgttgggatgattgatgctgatgtgaaaggtgaaattgggtcatgaccacacaaagaaaataaggaagaatatatctggaatgcagtagatccctcagggctaccataaatgtgataaatgttgatggaaaatgacaacaactaggtaggctgtaccactaacagacccttcaggaatgaagtttcagatcttatcaccaggcaaggaatcaggactagccaagatatttgcagaaagcaaaggaaatgcagaatgggtggtggaagaaggcagttataaataccatttatgaccacatgaccagttgcagaaatgagattatagttatgagtatttcttccttattttatcataaatcttgtaagtatatatgaaccaattctttccttttcatcccctcccattctcctactgagataagatgtgttagcaaagtttaaccttggccaggcacagtggctcacacctgaaatcccagcattttgggaggccaaggcgggtgcatcacttgaagtcaggagttcgagaccagcctggccaacatggcaaaaccccatcactactaaaaatataaaaattaggcaggtgtagtggcatgcacctgcagtcccagctatttgggaggctgaggcaggagaatcgcttgaacctgggaggtggaggttgcagtgagctgagatcatgccactgcactccagcctgggtgacacagcgagactgtctcaaaaaaaaaaaaaaaaaaaaaaaaaaggattatcttaagctggaggcaaatgggaatcaacaggggcagaaaaaaagccttcccctggagcttccctcttcagctttaagtggaaacttctggaaaattccctcgcctagggaagtttcatgaccatgaagaagagggaaagtcagttgagctggacctgcataaataatccttatcttccattagtttcccccatacatttatcttcccatagttttctgcccgttcaagcctaaagccctttttctttgtcttaactcttatctataaatgtattgttctttgctaagatgtgatataagtccaagtgctaaccatccctttgggttgttcaccactgaattttctgccttgcgatgtgcactgcatgcactgacaaattgtttttctcttgttaatctgttttttgtcagtctaatttgctacgctctagccaatgaacctaagatgagtaaaggaaaaagaacattttttctcccctaggaagtgaagcagcaggcattacaatctgaagatcatcatcgttagtggtgatgagcgacagacgtagacgtggcagaaggttctggtttctccttgctcttttccctgctccatgtcctcatacttgctttgtgtttagctgttgctcctttttgccagctctgctgaccaacagcaacgctagacctactgccagatatttggctgtgaattcacagagactgtagatataaagagacaagctctcatggtcttctgccccagcaccctgggtgatcccaacacagcagctggatgtgtcccacttgcagatttccctgaaagcattaacttgtgcccccaagctactgtttcacgagagcctgttcatgatttttccgttggcttcct

SEQ ID NO: 1094 - DNA, 4570 bp, Homo sapiens
ccggcgtctccgggtcgctagttccgcgccttcctgcatggaggcgcgccccgagaggctcggacgcggccccttaggcccggcatcagcctccccggccagcaggagaagtcagattgacgtgagtgaattcagatataactcaagcttgttagagggctttttaaaaataaaaagttgattccgtgcaagagagcaagttactgctgcttaccgttcagagacttacaggtgcttgcctgcattgcaataaaggactcatttattgagcaagacttatatttatctcttcattttggagagcctaataaactgttattacagtttctctactgactttcaaaagttttgaagtttgaaagacctttgcaattaaaacagcatgagcacggccagaacagagaaccctgttataatgggtctgtccagtcaaaatggtcagctgagaggccctgtgaaacccactggtggccctggaggagggggcacacagacacagcaacagatgaaccagctgaaaaacaccaacacaatcaataatggcactcagcagcaagcacagagtatgaccaccactattaaacctggtgatgactggaaaaagactttaaaactccctccaaaggatctaagaatcaaaacttcggatgtgacctccacaaaaggaaatgagtttgaagattactgtttgaaacgggagttactgatgggaatttttgaaatgggctgggaaaaggaggagagcattcccattgctttatctggtagggatatcttagctagagcaaaaaatggaacaggcaagagcggtgcctacctcattcccttacttgaacggctagacctgaagaaggacaatatacaagcaatggtgattgttcccactagagaacttgctctacaggtcagtcaaatttgcatccaggtcagcaaacacatgggaggggccaaagtgatggcaaccacaggaggaaccaatttacgagatgacataatgaggcttgatgatacagtgcacgtggtgattgctacccctgggagaatcctggatcttattaagaaaggagtagcaaaggttgatcatgtccagatgatagtattggatgaggcagataagttgctgtcacaggattttgtgcagataatggaggatattattctcacgctacctaaaaacaggcagattttactatattccgctactttccctcttagtgtacagaagttcatgaattcccatttgcagaaaccctatgagattaacctgatggaggaactaactctgaagggagtaacccagtactacgcatatgtaactgagcgccaaaaagtacactgcctcaacacacttttctccaggcttcagataaaccagtcgatcattttctgtaactcctctcagcgagttgaattgctagccaagaagatttctcaactgggttattcttgcttctatattcatgctaaaatgaggcaggaacatcgaaatcgtgtatttcatgatttccgaaatggcttatgccgcaatcttgtttgcactgatctgtttacccgaggtattgatatacaagctgtgaatgtggtaataaactttgatttcccaaagctggcagagacctatctccatcgtattggaagatcaggtcgctttggtcatcttggcttagccatcaacttgatcacatatgatgatcgcttcaacctgaaaagtattgaggagcagctgggaacagaaattaaacctattccgagcaacattgataagagcctgtatgtggcagaataccacagcgagcctgtagaagatgagaaaccttaacaagcatgctttgacaaattacaaaaggctcgtttggatctgtgacacatcgttttggggggaatgctcttctctttgtgggtttttcatcttttattttggaactatgaagacttaaaagagctcagacattttctttttttaactggtgaagagaaaaaggctgaaaagaaggaatataccttttttgttccacttgtttgcactgtgtgctgactgaacattagttgcactaactgctggtttttaaaaaatgttttctggggaaaggggacaaggaaggaaaagaaagaagagaaggggagaaaccctaaaaagagaagaatcttaatgaacacacaagcttgtcaatgatttcaaaattctccaacagctgactctcgtgcatttcaacttctccctgattcctcatccgttttttaagcctgaagagcttattacttatttgtgcgaagtgccttatgctatgagaccattcagaatatcatcttttagacacagcccgaggaatcaacaatagtaactctttctttccgtttttttttctttttcttttaaaaaatgtctttttattttggtttcaggttgaagtctcttccctttctacccagtactcgagcccagggctagaagttgaaactcactagtaatgttaaacaccattttttttttctttttggggaggagttgatatgcaactgcagttcatccgcactgtaaatacatgtatttaaaaaaacaatcccaagtaaaaatttcttctgggctgagtagataaaaaacatcatcgctcccaaaggaaagagcagtctatcattgcaggagccatatgacaagcctttgtgctctatagcagacactaaagactgggttacatatgcctccagtagtagtatggcacttgatgtgtagacatgtcagagccttggccctctttcctctgtggcaaagcgtgtcccatagaaaattgggtgtgtatacttgtataaactttgtaaataagttttttttctgggttcatatatatatatatatatatacatatatatatatttttttttggatgaaggttgctgggattaaggggattagagtgattatgggagcagctaaagatgagaggggctcagttttacgcaacactaaattctagaaagtactttggcctcgtgctgtagagagcagatttctatggtaccctgtgttagtaaaggggcccagaaatctgggatgtactgtttgctgccacactgtctcatctagtacctttggagtaggtttaccagagagagcaaggaagcttcaaaacattgataattcaagatttattttgagaagctctgattttgcttcttccccctttctaaaagtttgaggaatatttcaagctctgcaacagggggcaaagattaatctaccttgcagtgtaggaattctattgagtggcagtgtcattgagcagtatatatataaagcacagatttgcatttcagaatattagccagtaccagctttggtaatgttagcagttctggagcttaattttctgtggatcatttcctgtagtgtgtaaatgtgttgccctctgcccgctttgatacataaacttttgcaggaatgggcaacctgagagctgttaactttcatgctacagaaagctgcttgccattctcttgcattgtgacaagaattgttacctgtcattttgcactgtaaattgctggcagatgctttacagtcaatagtgttgctttaaattgtgcccctcccaacatgcttgatgtttggcctgatctccaggcaaaaggagtgagatgaatcaaaaccagtgaacttttttttttaatgtttttaattcccttttaacccagtgtactaggtcaatcaggaggcatctggaaagggggggaaaaaagcaaaaaacaaaattaaaaaaaattgatttccatattttatttttcaaaaccctaaaatattacaaaataagtcccgcatatactttaatgttttaactcttttggacaaaggaatcaattacttgaagttgcttttttgactctgcctacttctgagcaaactatttgcgactcacccacaattccttggagatcaaaatcctgcagatgcctcctgatgggacatagccctaactccttaacaactgtagcaagaactgcacggtacaaacccaaaaaagaacaagctcatctatttggaacccaagcctcatattttctgtccagtcaatgttggttactaaatagaaaacctaattaaggaagtaacttttttccagggaggggtgggagagggaatttaaaaggtgtcaacttttgaccaaaaaaattgtgcccttgtaccgatgcagctctctttctcccccacctcttgcgagataagagggatcattcatgtagaagaaaagagtataaatgcaattctgtatctcgctagagaacgtgtgggtgactaaacaaaaagtgcagtctccttcaccaactttagactgcgtggtgccacatgcctgtgggtccctcttaaagcacagacttaaaatggaaagtattactgaagtatagcctctaatgaggagtggcacttaaactatctgggacaccactactggacacggtcttgtagaggcagctgtccagttttggtgcttgactcttgaataggaattgttaaatggaaagatgctctgaggactaggtcaaagcctggtcttttttttttttttttttttttttt

SEQ ID NO: 1095 - protein, 476 aa, Homo sapiens
MSTARTENPVIMGLSSQNGQLRGPVKPTGGPGGGGTQTQQQMNQLKNTNTINNGTQQQAQSMTTTIKPGDDWKKTLKLPPKDLRIKTSDVTSTKGNEFEDYCLKRELLMGIFEMGWEKEESIPIALSGRDILARAKNGTGKSGAYLIPLLERLDLKKDNIQAMVIVPTRELALQVSQICIQVSKHMGGAKVMATTGGTNLRDDIMRLDDTVHVVIATPGRILDLIKKGVAKVDHVQMIVLDEADKLLSQDFVQIMEDIILTLPKNRQILKATFPLSVQKFMNSHLQKPYEINLMEELTLKGVTQYYAYVTERQKVHCLNTLFSRLQINQSIIFCNSSQRVELLAKKISQLGYSCFYIHAKMRQEHRNRVFHDFRNGLCRNLVCTDLFTRGIDIQAVNVVINFDFPKLAETYLHRIGRSGRFGHLGLAINLITYDDRFNLKSIEEQLGTEIKPIPSNIDKSLYVAEYHSEPVEDEKP

SEQ ID NO: 1096 - DNA, 4584 bp, Homo sapiens
agggaggaggcggcgggcgggcgaacgggcgagcgagggagggggcagaggagccgagttagctcagccaggcggcgacttcggcggcgccacgagagcgggcagcggaggagattgacgtgagtgaattcagatataactcaagcttgttagagggctttttaaaaataaaaagttgattccgtgcaagagagcaagttactgctgcttaccgttcagagacttacaggtgcttgcctgcattgcaataaaggactcatttattgagcaagacttatatttatctcttcattttggagagcctaataaactgttattacagtttctctactgactttcaaaagttttgaagtttgaaagacctttgcaattaaaacagcatgagcacggccagaacagagaaccctgttataatgggtctgtccagtcaaaatggtcagctgagaggccctgtgaaacccactggtggccctggaggagggggcacacagacacagcaacagatgaaccagctgaaaaacaccaacacaatcaataatggcactcagcagcaagcacagagtatgaccaccactattaaacctggtgatgactggaaaaagactttaaaactccctccaaaggatctaagaatcaaaacttcggatgtgacctccacaaaaggaaatgagtttgaagattactgtttgaaacgggagttactgatgggaatttttgaaatgggctgggaaaatgtcttatctcttttaggaggagagcattcccattgctttatctggtagggatatcttagctagagcaaaaaatggaacaggcaagagcggtgcctacctcattcccttacttgaacggctagacctgaagaaggacaatatacaagcaatggtgattgttcccactagagaacttgctctacaggtcagtcaaatttgcatccaggtcagcaaacacatgggaggggccaaagtgatggcaaccacaggaggaaccaatttacgagatgacataatgaggcttgatgatacagtgcacgtggtgattgctacccctgggagaatcctggatcttattaagaaaggagtagcaaaggttgatcatgtccagatgatagtattggatgaggcagataagttgctgtcacaggattttgtgcagataatggaggatattattctcacgctacctaaaaacaggcagattttactatattccgctactttccctcttagtgtacagaagttcatgaattcccatttgcagaaaccctatgagattaacctgatggaggaactaactctgaagggagtaacccagtactacgcatatgtaactgagcgccaaaaagtacactgcctcaacacacttttctccaggcttcagataaaccagtcgatcattttctgtaactcctctcagcgagttgaattgctagccaagaagatttctcaactgggttattcttgcttctatattcatgctaaaatgaggcaggaacatcgaaatcgtgtatttcatgatttccgaaatggcttatgccgcaatcttgtttgcactgatctgtttacccgaggtattgatatacaagctgtgaatgtggtaataaactttgatttcccaaagctggcagagacctatctccatcgtattggaagatcaggtcgctttggtcatcttggcttagccatcaacttgatcacatatgatgatcgcttcaacctgaaaagtattgaggagcagctgggaacagaaattaaacctattccgagcaacattgataagagcctgtatgtggcagaataccacagcgagcctgtagaagatgagaaaccttaacaagcatgctttgacaaattacaaaaggctcgtttggatctgtgacacatcgttttggggggaatgctcttctctttgtgggtttttcatcttttattttggaactatgaagacttaaaagagctcagacattttctttttttaactggtgaagagaaaaaggctgaaaagaaggaatataccttttttgttccacttgtttgcactgtgtgctgactgaacattagttgcactaactgctggtttttaaaaaatgttttctggggaaaggggacaaggaaggaaaagaaagaagagaaggggagaaaccctaaaaagagaagaatcttaatgaacacacaagcttgtcaatgatttcaaaattctccaacagctgactctcgtgcatttcaacttctccctgattcctcatccgttttttaagcctgaagagcttattacttatttgtgcgaagtgccttatgctatgagaccattcagaatatcatcttttagacacagcccgaggaatcaacaatagtaactctttctttccgtttttttttctttttcttttaaaaaatgtctttttattttggtttcaggttgaagtctcttccctttctacccagtactcgagcccagggctagaagttgaaactcactagtaatgttaaacaccattttttttttctttttggggaggagttgatatgcaactgcagttcatccgcactgtaaatacatgtatttaaaaaaacaatcccaagtaaaaatttcttctgggctgagtagataaaaaacatcatcgctcccaaaggaaagagcagtctatcattgcaggagccatatgacaagcctttgtgctctatagcagacactaaagactgggttacatatgcctccagtagtagtatggcacttgatgtgtagacatgtcagagccttggccctctttcctctgtggcaaagcgtgtcccatagaaaattgggtgtgtatacttgtataaactttgtaaataagttttttttctgggttcatatatatatatatatatatacatatatatatatttttttttggatgaaggttgctgggattaaggggattagagtgattatgggagcagctaaagatgagaggggctcagttttacgcaacactaaattctagaaagtactttggcctcgtgctgtagagagcagatttctatggtaccctgtgttagtaaaggggcccagaaatctgggatgtactgtttgctgccacactgtctcatctagtacctttggagtaggtttaccagagagagcaaggaagcttcaaaacattgataattcaagatttattttgagaagctctgattttgcttcttccccctttctaaaagtttgaggaatatttcaagctctgcaacagggggcaaagattaatctaccttgcagtgtaggaattctattgagtggcagtgtcattgagcagtatatatataaagcacagatttgcatttcagaatattagccagtaccagctttggtaatgttagcagttctggagcttaattttctgtggatcatttcctgtagtgtgtaaatgtgttgccctctgcccgctttgatacataaacttttgcaggaatgggcaacctgagagctgttaactttcatgctacagaaagctgcttgccattctcttgcattgtgacaagaattgttacctgtcattttgcactgtaaattgctggcagatgctttacagtcaatagtgttgctttaaattgtgcccctcccaacatgcttgatgtttggcctgatctccaggcaaaaggagtgagatgaatcaaaaccagtgaacttttttttttaatgtttttaattcccttttaacccagtgtactaggtcaatcaggaggcatctggaaagggggggaaaaaagcaaaaaacaaaattaaaaaaaattgatttccatattttatttttcaaaaccctaaaatattacaaaataagtcccgcatatactttaatgttttaactcttttggacaaaggaatcaattacttgaagttgcttttttgactctgcctacttctgagcaaactatttgcgactcacccacaattccttggagatcaaaatcctgcagatgcctcctgatgggacatagccctaactccttaacaactgtagcaagaactgcacggtacaaacccaaaaaagaacaagctcatctatttggaacccaagcctcatattttctgtccagtcaatgttggttactaaatagaaaacctaattaaggaagtaacttttttccagggaggggtgggagagggaatttaaaaggtgtcaacttttgaccaaaaaaattgtgcccttgtaccgatgcagctctctttctcccccacctcttgcgagataagagggatcattcatgtagaagaaaagagtataaatgcaattctgtatctcgctagagaacgtgtgggtgactaaacaaaaagtgcagtctccttcaccaactttagactgcgtggtgccacatgcctgtgggtccctcttaaagcacagacttaaaatggaaagtattactgaagtatagcctctaatgaggagtggcacttaaactatctgggacaccactactggacacggtcttgtagaggcagctgtccagttttggtgcttgactcttgaataggaattgttaaatggaaagatgctctgaggactaggtcaaagcctggtcttttttttttttttttttttttttt

SEQ ID NO: 1097 - protein, 314 aa, Homo sapiens
MVIVPTRELALQVSQICIQVSKHMGGAKVMATTGGTNLRDDIMRLDDTVHVVIATPGRILDLIKKGVAKVDHVQMIVLDEADKLLSQDFVQIMEDIILTLPKNRQILKATFPLSVQKFMNSHLQKPYEINLMEELTLKGVTQYYAYVTERQKVHCLNTLFSRLQINQSIIFCNSSQRVELLAKKISQLGYSCFYIHAKMRQEHRNRVFHDFRNGLCRNLVCTDLFTRGIDIQAVNVVINFDFPKLAETYLHRIGRSGRFGHLGLAINLITYDDRFNLKSIEEQLGTEIKPIPSNIDKSLYVAEYHSEPVEDEKP

SEQ ID NO: 1098 - DNA, 34493 bp, Mus musculus
  misc_feature (1)...(34493): n = A,T,C or G
aggtttctgaactaggtcctaatcccacgtgactgtgatctttacagaggaggaaaggtatgcctcctttccttttcagatgcaggtaatggcagaagctgcaggagccagtagagtctacagctagaagcccacagtagtgaccctgcagcagggtctgccagtaaaattccagcctacagaactgttttagcctaaggctgaggctagctagcaaactaaaacagggggagcaagaattgggcagctcttgtgaccatagataatgctgatttccaatttttttagatttatttattttatgtatatgagtacactattgctatcttcagacacaactaaagagggtgtccgatcccattacatatggttgtgagccaccatgtggttgctgggaattgaactcaggacctctggaagactggccaaggactcacctgtgaactggtgtgaatcccagctctgtcaaaagtggcacagagtgtgcacttcagttcttatagccctgtggcatatggtccatgattcataatttaggtagatttctaagttggaggccagtctggtctacagagtgagttccaggacagccagggctacacagagaaacactgtctcaaaaaaaccaaatatttatataatttattatgtatacaatgttctgcctgctgcgtgtatacttgcaagccagaagagggcactagatctcattatagatggctatgagccaccatgtggttgctgggacttaacctcaggacctttggaagagcagtcagtgctcttaactgctaagccatctctctagccccagatttattattgacatccatacaaacataagatattctctctacagaggttaagactcaagaagtaaacaactcaaaaagcctcaggaggtccctgaagcagatgtgctagggcctttctccctgagcttgtgtgagcagtcaggactgttgagactgtcagctgagttgcctgtgacttgtgtaatgagctccaggtttccagcttctaagagctgtcaccagggctggggtgggctttcagtgacacagctgcccttgtgtccttcctgctcttgagaaccgcccttcgttcatatacctgtaaggcaccccagcaaactcaaagctttcaccaaattggacttgggtggtatccttacttggtccgaagttccttatcttgagtgagcagatgtttgtttatgccccagcctgggtcaggggtcacttacaagctcccacccagctctcttttgtgggcctttgttctttcaaagacagatggcactcactgtcttgttagctggacaggaaagtctcttttgtgtcttcctgtacacctagaagccttctgttctggcactctagttcccacacatcttgagttgagcagctatcttcacgttacactgctcagaactgagacttaactccaacattaccctaccctctgcctctgcctctgggtgcagccatgagtagtggagatagaagtccctctcctcagttctttaatacagggtctcctgtagtccagctggcctcagactcattgtgtagtggggataaccttgaattcctgacccttctgcctccactttctaagtggaggttatggaagtactcagtacagggcctgagtatgctcctcgaacactgtcagctttcctggcaactgctccaagaaggccttgttggtctgtagctctggcccagctcttctgagtctcttgtctacctaggaaggatccagcacactcagagtagtggctcagcctcccctgggctgtggggcccaggctagtcctgaccagtttacccagatgcagtcccatcctccctgaatcattgagccactctttcttgggaactacacaactattttagtcattgttctattgctgaaagagacactgtgaccaaggcaactctgatgaaagatagcatttaattgggagcttgcttacagtttcagatgcatagtctattatcatcatggtagcagagagcatggtagcagaccagatagacatggtgctggaaaagtatctgagagctacatcctgatccagagatgggggggaggggggagaggggaggcagagagagaggagagaggagagaggagagaggagaaaggagagagagaggagagaggaaagagagagagagagagagagagagagagagagagagagagagagagagagagagagaacagcatgagtgcttaggcttggcatgaggaagatttatttatttatttatttatttatttatttatttatttatttatttaatgtatataagtacactgcagctgtcttcagacactccagaggatgacattggatcctattacagatggttgtgagccaccacgtggttgctgggaattaaactcaggacctcaggaagagcagccagtgcttttaaccgctgagccatctctccagcccctcctaatccttctaatcctttcaaaccatgccattacctggtgactaagcattctaatatttgagactttgggggccattcttattcaaatcacaccaaccttttcaggtagtgtggtgccaccattccagctgcagagacatatttccatggaccaactactaactttggactaccaaccagcagaggtgggccagctataggaactgctgtatagatgaacctcctcaggttacactgtgtgaaggcctattccagctggtctctcctggtttttctctttcccacctgttcttagtagcccttgcccaatctcagaagtccccaggaataggacctggctcttctttctctgcccccaggtatatatgtgctgtcttctgtacccagatttctcctagcaggggtcttaacccacctgaacaagcatcagatgatgttccttcacagaggccatccagagccagggcagagatattagctattcccatggagactctgtctgggcccccgaggcatctgggccctgtcatcatcacagctcagttcctggctctgcaggccaggcctcagcatttgctatgaatacacagtgcaggatcctgggggctttttcccattcaaggggtacattgtggcttggacctcctcacaacttgaatcgtgcacctatgtaagctctctctacagtctggtctcagtttctccatctgaccaggggaaattggactgaaagactgagaaggatgtccttctacttgggtgaaagcctgcttactgcactccttcctcgggtcctgctttaagatggaagaccagacaatgaagtatggggcagggttgaagttgtaacagatctggaggcagagctttgccatacacccactaggagggggaactctggtgacatccctaccctaggggtctctaggctaggctatgggccaaggggctgtcaacacatctggtccaaaggctgctgagccttttctgtcactgtctgcagtagaaagacaaaaggggctgtctgcctgccccctaccacttctgtctcctcccagttctcaccctcacttgctttctggactggcctcttcatttctcttgttcctggagttcccacagcaggtgccagagagcattccacctactgggaataatcctgaaagtagcaggcctgcagagtggctggggagtgctggtttaatcgccttcttcatctcacccagcaggatggagtctgtagccttgggtaaaacagattcctaggccaggccttggtggcgcacgcctttaattccagcactagggaggcagaggcaggcagatttctgagtttgaggccagcatggtctacaaagtgagttccaggacagccagggctacacagagaaaccctgtctcgaaaaaacaaaaacaccccccccccaaaaaaaaaaaccaaaacagattcctagctaggggttcagctgatggccagtcaggagtcttgagtcatagcttgtacacaagggggtgtggctcatagcttggggaagggtggggtggagaaaggtggactgctccactgttatctattactacagagtaagccaagatgtgtaagttccaccctagctgatctgaggctcaccacctctcccttgtagctgcagagggctccagagctcaggacagctgtaccaggggctctgttatagaatgccagagagcaggaaggctaaggagatgggttgtctatcgggtcctgagggttacctagcccaggtgaagagcagttggatccattagagtcatcaatgggccgagacactgcgtcattaaaacttagacattttagccgggcatggtggcgcacacctttaatcccagcacttgggaggcagaggcaggtggatttctgagtttgaggccagcctggtctacaaagtgagttccaggacagccagggctatgaagagaaaacctgtctcgaaagacaaaaaaaaaaaaaaaaaaaaaaaaaaaagaaaagaaagaaaaagaaaaaaaccaccttagacatcttgacaatcaaagaggctttacccatatccttgcaaagagcagagatggtggtggctttaccaggaagccgcagcctacaaagtcacctccctatctctagtgatagccactttatctggttatataaggaactgctatcctgccccttcctctgtctccagccagtgagtgtccctcaccagagccagcacatgccttccaaatataagcacagctccatgagagagagagagagagagggagagagagagagagggaggaaagagagagagagtgagagagctgtcaacaaggcctccctgctgggtgttccattccactgtctccttcatactcctagaacatgaatccagatgtggacaggagctctgagcatcttggagctttcatcctggtaatgggaacttgtcagtttagaagaagtttggggctgcaggtaggcaagaaggacctgggggagaggatgggagactcgtttttctttttgatcattgactcacagcaggcctggcttaaccttgtcttgtgctcacacttctgcagaatttgggcttgttctgacagggcctctggcactgctcacaggtggctggccagctttatgtacagccagccacctgttctctgccagccacaccggaagctcctttgacatcttcctgtccgtgagtttgtctgaacacctgccaggaagaggagacatgctgtgacctggattccaggaggctgctgtagttgattccctcacttagctgtttagtggggtaaacacagaacagtggctgtgagtaggactgccaggcacagctggcagggctgtgtatgtgtccacagatactgtgcagcaagccctgcagtttttagataaggaacagccctgattcctaagtatagggttgagatacagaagtggggcccatcccacccttcacccctggcccagagtccctcaatgacttgattcagacttcatatagacatcaaccccacccagcttgtgctcagctctaggcttccctgagctatgggtgctgactgcaggcagccttccccagtcaacaagaccttgtttgatcctcacaagagccagtttgggagggaacttgaaactgaaaacaggatgatgggtgccttcggtcatgttggccatccgggaaagcctggagtttgtacccagtactgactggctcaagagcccacttttcccaactctgccactgcccagtagtcttcctccaggtacagaatatggaaacagcaggactcaggtggatatttgcaagctacttactttataatgtggggagccagaagccctcatctctactctggtacttctctggcttcattcctgctctccatgcccaccactttggtgaggggattcatgggatagcagctcagttggcaccaacttttttcaccaccggcctcttcacaaggactggaccaagtcctcctgagatttcatctactcacaggatgtgggaggactctgggactttcccattctcaggcttcaggtctctggttccagctttaggaagggcctagaagatgcctctacttgaacccctctcctaccccacccctcagggccccggcatatcttttttttttaattggatattttatttatttacatttcaaatgttatcccctttcctggtttcccctccggaaacctcctatcccatcctccttccccctgcttctatgaggatgctcacccaaccacccttctaccctctcctgcctcccaaccctggcattccctatactggggcatcgagccttcccaggaccaagggcctctcctctcattgatgtccgacaaggccatcctctgctacatatccagttggagccatgtccacccagaagtggacagctgcagcattacaacccctttctgggacaaccttgaaagacacaggtgaagggaaatcttcacagtgggcagaacttcgagcagtacacatggtattacagtttgtttgcaagaagaaatggccagatgtacgattatacactgactcatgggctgtagccaatggattggctggatggtcagggacttggaaagatcacaattggaaaattggtgagaaagacatctggggaagaagtatgtggatagatctctccaaatgggcaaaggatgtgaagatatttgtgtcccatgtaaatgctcaccaaaaggtgacttcagctgaggaggagttcaataatcaagtggataagatgacccgttctgtggacaatcagcctctctccccagccatccctgtcattgctcaatgggcacatgaacaaagtggccatggtggtcgagatggaggttatgcttgggctcagcaacatgggcttccactcaccaaggctgacctggctacagctgctgctgattgccagatctgccaacagcagaaaccaacactgagccccagatatggcaccattcctcgaggtgaccagccagcaacctggtggcaggttgactacattggaccacttctgtattagtcagggttctctagagtcacagaacttatggatagtctctagatagtaaaggaatttattgatgacttacagtcggcagctcaattcccaacaattgttcagtcgcagctgtgaatggaagtccaaggatctagcagttactcagtctcacgtagcaagcaggcgaaggagcaggagcaaagatcctctttggttggtggcttagtccctgggagctctgggggatatagttggttgatattgttgttcttcctatggggttgcaaaccccttcagctcctttattcctttctctaactcctccattggggaccccgtgctcacctacatatcttatattcccagaactttgtccctcttaggttggcaccaccttccagcaggcccctccccctttaagcagattgactctctccactccaggcccaaagcccctccttgtcttcctacatcagcatcacccaagttcactctaaaacaggctgtgaggactgatcctacactctggcataacatccacaagtccaccctacctaggcccaagaggaagcgagacttccagagttagggtgtttcttgcccgatttgggaagcaaagctgtgttgaacttccagagtattgggtgatcgcttctcggccttttggctaagatcaagtgcagagtattgggtgagagccaagagagtggcatcacagcacagagaagaacctgacctctcccaagatactttccagggaggtgactttagagctgaggctcaaatgtacatcaattcattccaggcaggacaaagctagatatagcagaggagaattcaagggcagacagaagagagagcactggggcccacgaacctgggaggggaaaagaaaggtagagagaaatagaagctgtaggagttgagtacaagcagaacgggacatcaccttggtgccctggagtcaagctacagaccaggcacacagaaaaggcttgacaggcccagggcacaggctggtggaagctggtgctttggagcagtgggtaagcagcaagtctccttctgggggagcgcagggctgagcaaggggtggaggagcggttccaaggttcctctcaacagagtaccacagagatgagatgtgtatgccgggagacgttcatcaacctaactttacttcagaaccagttcttttcttctgctaggttttatgaagagagacaagaggacgaaggtctaatgggagaccatccaggaggaaggccaagctgcagcctctggagaggacagggctaggagacagctcctatatcagctgtcagcaagaagtcctctctgtagagagagtgggggctgtaggcagatggccctgatttttcctgttaggatggtaggcaggaagacggtctaaattatctcatttctgacacttggggtagggcaggagatgggaactttttgaggatgtcggccttaaactggaggatgctattttcccgtagccatggaaacatggctgggcagcattggtaggaggtgacgacaccacagaaacctgtgaacgaaggaaattctatcagtgtgggcctggcctcaggtgggagctgcatcttctgacgcctggatatttcaatctttggcttctaggctggaaaccaatggggcaggactcgggcagaagcagttgaaatggctgttgaatgtctgtggggttggaaggtgactatgagtcagtttgagtttgcaaaacataatcacccagctttttaactcaaccgcttttacttggttggtgatgaagatgccgggccattacgtcagaaccagaggcaaagctctctaaaggcagtttcatcactgcaggggggcctagggagccacagcacctggtgggcgcgcatcccgtacggggaggggacacctgggaaaccctggctgtccgcgttgagtcagcaagatcctaaagctatgccccgccctggccggccgccgcagcctcgcggacctcgcgtggcgtggggcaattaggcgcggcacccgcccgcttggctgcgcgacgcgcgggggcggggacgctgtcaaagcgaggcccaaccaaaggaccgcgacttgtattctcttctgaaaaaaaaaaaaataagacctcatgatcctgccacgacaaagcgttggacagtaggtgggaggggtctagactgggtgcctcacgcccgatgccgcagcgaaaggacgggctgagtgactcgagtggcagagcgggagcgcggcgcggctcggggcttttgtgtggcgcgggtttcctagcaagactgacagcaagacgctctgaggtgttcaagggaaggggacgatttctccgtcagaccccaccgccgaggctcgcggggatcttcccggagactgctcgctcgagccagctggggcgtggcaccaggactttcaaaaaacccgcacaagccgagagcagaatgtgtcgtttgcttcttgcgcgcaagcggagtcgcgcccgccttcctctgcccgggcgcaccgaccgccttcgtctctagcgccctcccgggccccgggagaacaatgccggtcctctccgcgcgcaggaagaggctggcgagcacagctgggccgcggcggggaagcggccccagcctggcagtccggtgggttcctcctttaggcccagagccgtcctcagaccgtggtcgcgcaccgatgcggcctcgggggcctacgtgcagcaccacacggagaggggcaggccgcggcccgaggctgctcccgggacctccgggaagagacctccaccgatgtcgcccggaccctggcggggcaggccagtcccccagagtctgcgagttcggggctagagcggtcaggcctctgggccgggtcgagcccgggccgccgacggctgcgtcacgcgagggggcggtgctgccacgggcggaggccagagccggaagcggaagaggcgctcggagtggggagtggggcctagccgcagccggagcctgggagacggtgagtgtgggcccgagcccgtggccgggcagctggggtgagtcggtggggacggccacgccggtacgggtaccgtgccacccggtcgggtctcggcttggacctatttccctcttcggcccacgtcaggccgcggtcccgacctctcacccctgacccgccgcttctctccctgagggcggtcactgcagaccccttttctggttcccgcggtgttggaggcggagctccagcggcctcggagccggctgggaggcttccctttgggtcccgcgccggcccgctggctgggtcgcgtccgacctaggctatcctggaaaggctttccctgccccgagctcgaggcttagcccgcagatctccttcgcgcgccgcctggagtttgattctggcccaggctggccatccctttggtcgccgggtcttcccttggcggttacggggaacggggctctgagatccctgggattcgggcagaaggaagggactcgagtgcgggccgccggccccctccgtgttttgttatgatggaaccgctccatcccggagaatgggccagaccaagccaggagtacaaatgtccaggctgctcctcggtccggtcgggagcctctatgctttagttccgggtgcgggtgccctgatgcttgggtgggaattgccagagtctagcccccatcaaggcggagttggcggccttccagtttccctcctccgtgcccttgaaaaggaggagcgtttttgcccggtggcagccgcagattgcgaggtggcaggtttgaggttgcagtggtggggcactgccagccaaaaataaccatgggtcgcttgggtggcaggaatccgggagggcagccgctgacctggctggctgctcttcttgttagcccggttctctagccaggaacagcaaatgagaagccagagaggcctgtgctcatagaaaaattggcatccagtaacttggtctcattggtcacattgcctttttcttcattgttcagagcagagcctcccaaagcataattgtggcctttacgttttaaaaagcttctttgccgaggactcatggaatcggagaatttgtgagaaataggctcaaacgacctggctgggaggaggacatgggccacctggtagctcccatttttcacctgcctgggatgcgttgcaagggagattatctccattactgcctatgtgtggtacttcatggccaaaatattgggccatctttgccagtatgagaggtgttatcttcatttttcaggcatgacaatttaggtctagagtgacttgtataaggccacagggccagtaagtggcaacactgggatcgagttcaaggtttcctgccaaaacttcctacccggtcccttggaaggaattataaattaaggcattcaacatagccctgagtgttagccggaaccttctcagtgctaatgaaaggctgtctttagtacttcttgtggcccaaacctgtgctaggcttttgactttatagggcagacatttaattcctatggagcctgtaagagattattgttcccttgtttcaagaggaggctgaagcttaaagtggtttaataacttgcctaaaggcaacagtgaagtggtattgctgtggagcaggttggcattcgactctgaggctgtgactttccactcaagtagacatatgtggtcatagaaatccacttaggtcccagaaggaaaattttggtctgctgtagattagaccgcattacaacatcctccagataggatgcttagggtgctctgtctgcctggtgaggatgggcaggaccactttgccttttgggaagatgtatgcctggccagtaggttgtcttttgggtcagttggtgagacatgggctactgctttcaggctacagcctgagcacctgtcataaggtcatggggtgggggacattcagataagtgtgaaaacaacagtgcctttcttagggctcccagaggtttacataaattgcctcccaatcctgctcatacacaagtacctatttcatctttggactgtgctggtgagatggagcagccttgatggatttgtttaaaaggtgcttggccaggcaagcctaggactatgcactactagaggttgggtgtgagcaattgaaggcttggaaagcaaacaagctgtgctctcatgcctggccatctggtggacaaaatgtgaaggggctggatatgggtgaaaacggtgccagactcacgtagccatctctctgaactggctgctgatcccatttgggagtctccggtattggatctaagtactccgtggttaaggaatacttgtcctacttcccagtgtagacctacagccacgtcttcttggctccttcagagatagggcacaagaaagagtgccggagtaggaggagctagaagggatggctatgatgctgttaaagaggaagcacctggtatgggactctagttggtctgagggccactaaaatttgcctcaggcaagcagcttagatacctgattgtggctcctttctgggctgatactctggatgggtcagcaagagctgggcaggccttctgggcccaggcccacttggctggaacctgataggagtagggactattggtgagacattgtgtctttgctcaagggtcagagttctcatttctactgtggttcctcactgactgaagagttttgaatttctttgagttgagtccagttcattgctttagccaggcaagtttcagtttagtactttggctctgtgccaccagttcattagctccaggcttctagaacatttaggttataggatcccataggcatgaagaaattgagcaaaaaacctctccattcctcctgtccttggcatccccgtggcagtgctcagcatcccactacatctacttctgtatctgggccctggcttgcatagtttgagtgttcaggcccctgggccaggctggagaggcacctgtttgtttattcacttggcagaggagggagtcatccacccattgtctgctgttctgtcactgtgacatcagagttcttctttacttcataaacccctgggaggggctacccctaaacagaacaatgggcctcttcttcaggagcacctggctgcaccaggcagccctgtggctggaagcagtgagctgtgtgttgagcagggctttctctttcttgtggcctagatgcatcactgtaagcgataccgttccccagagccagacccatacctgagctaccgctggaagaggaggcggtcttacagtcgggagcatgaaggtcgactacgatacccatcccgaagggagcctcccccacggagatcacggtccagaaggtgagtgggatctgggtgggaagaagctttcctcagctagatgagtagaatggcccagagctctgctgctctcaggctcctttagatggctgcttctgcccagccgcccgtagattcttgccctgacctctctgggatccttgcctgtgcttgcttccttttcctggcctcaacagaagttaccttccttgtcatcctttctttctttgtcagagtggtctctctccctctgtattttctaggccagtaccctacccctgagtcttcctcagtagaagtaggaacatcaccctagccttgaaagactggtcccaagtcctatctaagtccccagaccaaagttacagttgtagcagcctggtcaactctgctattcttggaggccttcctgtgctccccttcttcttcctccctctgtggcattagagggacactgtggcactagagggacactgtcattacctaaggctctggagaataagctttgtatctttgtaccttctcttgccctgttcactccccctcagcctggatacttcagctctaacaggctttccttgagagcctttgcaggggccctgccaaaggcctcttgcctgctggctagtaggaaccctgcagcaggaacctggctagtaggccttcttgactcatcttgctaccccctcttggcagccatgatcgtataccctaccagcggaggtaccgggaacaccgtgacagtgatacgtatcggtgtgaagagcggagcccatcttttggagaggactgctatgggtcttcacgttctcgacatcggagacggtcacgagagagggcgccgtaccgtacccgcaagcatgcccaccactgtcacaaacgccgtaccaggtcttgtagcagtgcttcctcggtgagtggtggccagagtgtgctaataggggcctaaaggcctcacctctttctcgcttctctcaggctagctggtctgggtgagtactggcaaccctgtgtacatacaccattgtgggtacacacatgaggtgtgtgtgtgcgtgtgtgctgtctggtataggactgagcaaggatggtatgccttccattttctggccccttgccagtggcaactataagggctctggctccggcgttggctgatttccagcctgtctatatctttccactgttccatacacaggctacatggtacacatgattgggacacacttctcagggctggtactaagattgttgtttgtggtttggggctatatggcctggtcttcttcacatcaggtctgtccccatcgggcccaccccatagctaagtgctttgatgagtgtggatttgaccttctctgcagcctcatctccacagtcctcctctcccagaggaccagagtctgttattacccaataaaaaggggacactttaccagttaattttatttttcttttttaaatgctgggagtccaacccagggcccatacatacgaggcagatactctaccactgaactgtatcacaccccattccctacacctcctctttgtttttgaaagtcttatgtattccaacctagcctaaaactcatgatccttttccctctacttcctgagtgctgggcaccaccgcctggcttcctaggcttttctttttttgatatgggtcttgaatttctgtgtttacttttccaagttgctggtctgtaagagcacatcactttgccctgtcagtcagctcaggttggaagcttctcatcagacctccagccaggctctcttctaccttgttcctttgtaggtgtgctacttacggtaaggagaggcagctgtctgcgtggtgagatcccaggcctcaccttgttgcaggccacttaaagaccagagcttggccagcattctagggtggtgtgtggaacagaccaagagcccacactgtattcaatcccatggaaaaggaaggtcactcgtgtttacaaggctatgtgctgtcttctcttcttcctgtttgttctccccgtgttgtcctcctgctggccaagcggcctcttagtagtggtgggtttggtgaaggtatcttctctacccagcgcttgacctgagtggtgtgagctgaaggttgacttgccggtgaatcaatcatggcttgtggcctcacacagtgccgtatgctgccactgggtggcagtgcaagtctggtgctctgcttatttttggtgccctctgtcgtcgtgggctgggtctggcttaggagtggcacaagtcctaaggccaggtcaggagctggcttggggcctgaaggtcggccagcccaaaggatctcagccaggctcatttcctgctggagtttggtggcaggagggctgctggcagaagtctgtttctggtagttggttaagtctggccaaggatgtcatgtgggggcaggtagtagcttggttctacgtggcagctgttgaatatgttgtaaggctgtgtggaccagcagaggcaggcaaagaaagggtgagcatactgttgctgctgaagccaggatagccctacaacctgtccagaaggctggacccaggttgggccagccgccttttttgcgtcgtcttcagctctggccagagtcacgggagggtcagggagggggagactagaagaggagggagtcagggctgtggctgtcctcggggcctggcccctctgtgtcataggctggacatctttctgagcatttgtggcactcttcttagagataatgtccgagttttcttacatacctgtagctgtttttgcttttctgttttgaagtcagtttgtgtcttgacgtgtcccttgcaatatccctatcgttatatatgctgtgtgccttatgaaatgctgggatctggaaaatccaaccaaccaacccaccggctcctcaccgtctccacctctgcctttgactgacacctcaatctgtcaatcggaaccgcctaccatgcgattggtcggatggcgtttcggggggcggtgcatgcagagaagccaacagagcagtaagcgcagcagccggagtgtggaagatgacaaggagggccacctggtgtgccggatcggcgattggctccaagagcgatgtacagccacctttcgtaaaactttacctctctactttctaccccccttgttagatgagacctctcctgcgtggaggggcctctagtgcgcgtggcgccttagtggggccaccagtaattgcctgaatgacacagacactagcaacttctgttttaaagagtgtagcagtgagcaagaacctttgttgtttttgaggatttgaatgctgtgaacttgcaggagctgccaccctcctaccctccagactctcatgcccagcttcttctttctcacagatgagatcgtggggaacctgggtgaaggcacctttggcaaggtggtggagtgcttggaccatgccaggtgagcgtgctggtacaaacatccttgaaagagctagtgcagctctttttggagggccgcaccattgctggatgtgttgggtttgctgatctcatgaaataagggaggcatccttggggtttgacaagcctgtgacatcactacaagaacttttagctagtgtgtgcctcctccctggttacccacttctcagctgtggcattggatatgtggcccagtgctgcatcccatgagcttttggatatttttggccaggcttcatctatctggtttcttgggcagaggaaaaggtacatataaggtcctgggaacctttaaagaatacaaagggagtcagtgcagggccagaggaggtggacttcatctctgccagcagggccaggggcttcctttgaaatgagttacatctatgttaaagataagacggctgtggggagggaccttgtttcagaaggctaaagtagtggcctctccccttggccagaaggttgaggatgctgctggcttggcctgatagtacttttgcccctcccatgtcttcctgagagatcccagccgaaggaaatgagactttggcctttctcaccaaacagctaccaactaccccagtgcggctagggtcatgagtagtccatgctggctgggaaggcagtacctgtatgtgccataatgctggggccagatcattctctccaatcctagcagtataacacttactgcttatcatctgtcagcctagagtctgcttccttccctgtagctgtatgttagagaggcaaccctctggagagccagttcctgccttaataatctctaattgctttagttacagagaactggtatcctcatttgagctatgcagggcaccgcttcagaaatgaaatatgaagatgctcgggagttgcccaagttacacctcagccattgatgacagagctgggcttgctgttcttggtctcccacattaagtgagctgctcaaaaaagaccattgcacccaaaatcagccatcccctcagctatgagatgaagtgctaatgagaaacttcctcctgcacccattttctattcaaccatttctaggttcttcatcatgaacctagaatgagtataaagggacacatacacacagtcctgtgaccagatgtagacaggacaggtccaggaactctaacctaggaagacagctatactatgggctgtccctctttgagtagttgggggtaggaaatgagtccctgaagtcactaaaggacagacaaggtcctgggtcctttaaggtaaatgaatgcaaagggagtcagtgcaggatcagtggaggtggacttcagctctgccagcagcctggcaggggcttcctttgaaataagttatacatatgtttaaagataagacgggggcctggaagccgggcagtagtggcgcacacctttaatcccagcacttgggagacagaggcaggcggatttctgagttcgaggccagcctggtctacagagtgagttccaggacagccagggctacacagagaagccctgtcttttttttttttttttttttaagatttatttatttattatatgtaagtacattgtagctgtcttcagacactccagaagagggagtcagatctcgttacggatggttgtgagccaccatgtnnnnnnnnnnnnnnnnnnnnnnnnnnnnnnnnnnnnnnnnnnnnnnnnnnnnnnnnnnnnnnnnnnnnnnnnnnnnnnnnnnnnnnnnnnnnnnnnnnnnnnnnnnnnnnnnnnnnnnnnnnnnnnnnnnnnnnnnnnnnnnnnnnnnnnnnnnnnnnnnnnnnnnnnnnnnnnnnnnnnnnnnnnnnnnnnnnnnnnnnnnnnnnnnnnnnnnnnnnnnnnnnnnnnnnnnnnnnnnnnnnnnnnnnnnnnnnnnnnnnnnnnnnnnnnnnncttatgtacatacaataaatgaataaatctttttttttttttttttttttaaaggtaagactgttgtggggagggaccttgttagagaagttggtagtgtggcctctttcctttaggcctgcactgtccaagaaaccagaaaagaaaatttaaaaaaaaaaaaaaaaaaaaaaaaaagagggttatcaaagcagggcattctgaagagggtgtctttgcccaaaggctgatgaacttgttcctagcatccaggccaacccttgaggtatcaggatacaccgtagtgggccaggaccacctcatttcaggtctccactggtatcttagtactagctctctttggcaacgtaggctgacatgtttccttgtctgctcacatcctgcaaatggccttctagagtaggagtggagtatgaagggtagagcaacaactgcaggagcgagatcttgggggacacggacagaaggttcttggccctctgtagctggtggtaaattagaggcagatagttgggggaaaggacctagaatagggtgcagtataaggagtgaccaagcttccagctaaaattccactactggtaccctaactgcttgttcggtctcactactacccaagccaagaaagcttggcctatagagtaggttgccaggtaagcttccagggatctggggtagtcaggattacctcagctcctctgcctggcttctccctggggagctgggagtttctgagatcctgaatggacatgacaacttgaaagctgagacagccctaacagatagatgccagggaagcttgaatggtgagcaggtctggtgttgcttttaacaggctagatctcaagtatgaatacagtcttaggacctgtggtttacgtagtagagtttgttaggagttgctgagtttcagggaaggggagagagctggacatttggcttatgggaacctttgtttctctcctcctctatagagggaagtcacaggttgccctgaagatcatccgtaatgtgggcaagtatcgggaagctgctcgtctagaaattaatgttctcaagaaaatcaaggagaaagacaaggaaaataagttgtgagtatctgcaaagagtggacaggtatcactcagtgggtggcattctctagttccagctgcctagtgtcctcgaatttggtactagtcacacagtactcttggggtttgacagttgttctttctataaagagcccttggacttcaggctctaccctgcctggcttgtgttctgaagtagcccaagccttgcatttatgagttaagggacttaacaggctagggacacttaaagaagacaccagtgaacttctctataagcacttaactgtgctacagtcagcagaggggctgcacctgcccaggtcctctagaagctcagcagtacatggaggcctgcgctgtactggtgcagttgtatctgcctctcagtaactgtgtcagggctgcttaccctgggtgccatgggtgagctgggatcagaatgtagcccctccacacaacatgtacagttcttgctaagcacatgggtgtggtagtggattggcatgtgctctggctccaaggcttgctttttaccttggtagaacaattgggggtcaggtgaggcagagcttgaatctcacctgtcctttttctctagcctttgtgtcctgatgtctgactggttcaacttccatggtcatatgtgcatcgcctttgagctcctgggcaagaacacctttgagttcctgaaggagaacaacttccagccttaccccctaccacatgtccggcacatggcctaccagctctgtcatgcccttagatgtaagtgttcattgttggtcacctggtggtcttgctgtcctctagcacactgttgatcattctacaaggtcttacaggcctagagcgtctggctgaaaggttcttctgccttcagataggaattgtagtgcaagaatggaaaaacttgagtctcttggagggacttcataggccaggcgcttccccaggttaggaagaaaacaggaaagtactctagaagtggcctagctactaaccctgccttcacctttatggaaaagaggaaaaggaagaatgtggacccaacaaattctcaggtcctgctagtcagatacctccatcactcatctgtccaccaaccttgaagagcagctttgatggtaccacagtagaacttatgtggaaaggcaacttggaatgtgtcaagtgcagggcctgaataggtgatggggaaagaaccaactattaaaggacacagctctacgaagatctggggtgtgactcactccagtggagaaggaacatggtgggaagtgctctggctcagggggatcatggagttgtgaggatcttacagggcaagtgaaaaccgggaggttgaaaagtaatggcgttaagacgtgccagtgatgtagagtggaggcaggtgtcccttcataggcatgtgatccaagagtcacacctttggtgcagtgaggcctgttaggtagctagtgctgaggaggatttacccatgttgcggcttcagcgagatgggggggctttgcctctgtagagtgtagaggctttattgatggaaaccactccttctatccctgccctcagaatgcttatgaggtttcacagagctcttgaaagctgggaaaggctagggcctagaactggtgggcagcctagggtctcaatatgtgcttctccctctcctagttctacacgagaaccagctgacccacacagacttgaagccagagaacatcttgtttgtgaattctgagtttgaaaccctctacaatgagcacaaggtagacagcactgactgggtgggcaagagtgtggccctgctctaaggtagattagataatgcctgagcagactgacctaggtggcatgccttgccttcagagctgcgaggagaagtcagtgaagaacaccagcatccgagtggcagactttggcagtgccacgtttgaccatgaacatcacaccaccattgtggccacccgtcactaccgcccacctgaggtgatccttggtgagtggcttcatagccttcaacattgtttacatctggcagttatcaaaatgaatagctggggggctggagaaatggctcagtggttaagagcactgtctgctctttcagaggtcctgagttcagtccccagcaaccacatgtggctcacgaccatccgtaatggggtctgatgccctcttctggcctgcaggcatacatggaggcagaacactgtatatacaataaataaatcttttaaaaagaatagctggatgtggtggcacacaactgtaatctaagcctttaataggtagaggcagaacagatcagataaggctggccctgggctacccaagaccttgtttcgaaatgaggcaaatggtggtaaacagtatccatcaatctgccatccaggcctacacaatatttgagatgaggtagacagtctttgtctgaaacagccttgttagtggggcttgggcaagagttttgccagccagacttgtagcttcctaggaatttgaggtgttggttctcatattttaacatcttgacttacagagctgggctgggcacagccctgtgatgtctggagtatcggctgcattctctttgagtactaccgtggctttacactcttccaggtatagtactgcattggtggattgcaggggacatgagcaggaagctctatgtggttgaggaattgatgtgttccatccttatgatgtgagtctaggttcttaagggttatagttgctcaggggaaagaatcagttggagtctaaagcaggtaggaaggattttatcaaggacaagactgggtgcagaaagattcggtctgggcaagggcatatcataggcagccttttgcatgaagaaccaacctggtatgccaatagccagccaggtctacctgtggggccgaagagcccgagcctggccctagttccaggcctatgggctgccaccaagttggtttttcctctcctggagaagggagggctcttgacctttcctcatgctttttattctcccaaagtgtgcagaggttgggcctaattcctacttgctctgtccctggtcttctgcagacccatgaaaatagagaacacttggttatgatggagaagattctaggacccatcccatcacacatgatccaccgtaccaggtaagaagtctccatggctctgggtcagcagggtaccagagatactgcccttgccaaatacttgatggttctccaagctgctacatagcctttactgtatgtctctcaaaccaatctggtaaaaagccgttgcccccacttgctagatcaggcccacacctcttttctggcccggttctgctacttgaaggctgacagggaccaccctttcccacttcccacctaaccctagaccctaagggcttctattccttgactcccctttcttctcccccttgactttccaggaagcagaaatatttctacaaagggggcctggtttgggatgagaacagctctgatgggcggtatgtgaaggagaactgcaaacctctgaaggtcagtttctggctcccccagctcagcccatgccaaggagaccccaggcattgggcaaacaagcagcagaggcaggatgggcagccaatagctgcctgatcgtctcagttctctgtgaggctttctgcgtgctggccttgaggggctcttagccctgcccctgtccacagggtggctgagaatataatgggggaaaaaacacagaagagccaactgtcagactgctatttcctgtccctctctcttctctgaattttgggaagaattaggcaggactgaggcagggggagggaagacctagatgtgactaaggaggcctgtcaactgtaatttggtacctggacaagtgcattttgcagaggtgatttctacccacccatcagaactttgcatgtggggtagaggtaccaacccagcaagatcccacccagtagcctaagttctgagcatgaaaggaaatgagtggctgttctgtcctggaaggcagaagtagtcctccaaggaggcatcattgcctcctcaacccatcccagcaaggcatcccagaggcaaggggactgcggtggcttcccacaaccctgccgtccaactgaggcaccttgtgtccttgagcagagttacatgctgcaggactccctggagcatgtgcagctgtttgacctgatgaggaggatgttagagttcgaccctgctcagcgcatcacattggcagaagccttgctgcaccccttctttgctggcctgacccctgaggagcggtccttccacagcagccgtaaccccagcagatgacaggtgcaggccagcacacgaagagttggagagctggactgggctgctggccccttttctccagcctctcccactggcctcagagccagagccaccgatgaacagtgcaatgtgaaggaaggcaggagcctgcaagggaagggggaatgtggtgcccggctgccagaaagcacagattggacccaagctatttatatgttgtaaagttataataaagtgtttcttactgtttgtaaccccctggtaccagtgtgtccatctccaggctccttgccctctccctacgctgactgacttattaataaagtctttcttagcagctcagcttgtggaaagccaagtgtggtttgggccagacacagaaaggcaagccaataaataagctagaagctggaacatcccttttagggcagtggttctcaatctatgggtgacaacccctttgggaactgaaccaccttccacaggggtcacctaagaccataggaaaacatttacattatgatgtatattagtaaactgctatgaagtagcaatgaaaacagttttaaggtcactgcatttggaaggttgagaacaactgctctaaggttaagtagagttttggccccaggagacttgccagacctagaaaggaaaggctcttgcattttcatttaaagggcaatagctcactattagaacctagttgtgcctcagccaccatgtctctatgtacatacccagtgatcagggtaggctcctagggattagagaagcagcacttcactctaggaagcagtttagatagcacaggtttctgtcactttattgtgctggctttgggtttcccaagagctgcatgcattagtgacaaatatgaccacctgactgaaaccagccattgagcagaaacttccaaaaagagctgcaggtaggagtaacacactttcaactctaggcaggtccaggccaagagcagggagaactgccgaatgctaaccatcttcaggaccagagttctaccatcttatgtgtgtctagtagcctgtagtggctgcctgctgtcccaattgtaaccccgcctttagaaaaagaggtccagcttaaaagctaaagttctgtcgtgcagctgaggctcccagtcctctggcctctttcctggagctggagataactgaagagaagagacggaaaggctatcatcatctgttcctacaaggaagcagcctgaaaaattcatggtactagggtttactctgtacccaaacattttagcaagcccacctgcctgtccacctatacccctcaaccagtgctgggcacagtagaaagcttcaaagtacaagacctttacaaaggtctctgctgaggctccaggcatggtcctaccctcctaacctgaaggacccaagcctaggaagatcctgaggataatgccctaggtaggacctgagcagtgcgatgttcgcatggctgaatcccactactgtcatctagaactgggctcatttttggcatgtttgagacaggccactagttccaactatacacctgaggagggcaactataaaggattaaagcctaaacataagaactggagtgaagccatggcaggatgggggacatgtaacctgtcctgggatagctgaaaacggccatttccagagacagaggggcagacggaggcgtatttatggacaaggaggtaggaaatgatggtagaagcaccaagctcctccaaggtctccccaatactgaaaagctgtatcatgaaggtctggttcctaactaggagatgggcattgtagcttgacaggcacaaaactgctgatgacagcagagcagccagtccaaagtctttaccacagtcatcctgacacactcctcaggaaaagtcccaacataaaattggaacatctgaggagggtccaaagtttccaaacaaactctggtagccttggggggaagcagagacacacacgggtttgtcttctggatagctgccatgcagcctgatctaatgattacaggacaagtgggctgcctggttgcagggccaaaggaagcataggagacataaagccttctgaaataagagtggctggaggccctaacaggttctggcccatccccgcaatgtgccagcccacacccagtggctgtaaacctgacacagtcttagagctgcctatgtctgtaaacaaagctccagtttaatggaggcagggtaggattgaaagatgcctggagccactggtccacccctgacatacatgccagtgggaaagccttccctggttaagggaaggtggcaggcaagtttgaagtatgttttgttctctcacagaagaaataaacccaagagatagtctacaaggtccacaaagcctcacatccttaaggcgtcccatagtgggtttggctgcaggagtgcagggaatacagggtccagctgcccagagcccctctaggcagagtgtaggggaatgacaaatttgcagccaaaaggtgaatggtagttgatgccaacctcctggaagacttgctggggaatgccaatgtcacacaaatagactcggcctgcgtgctccccgagtggcagaggcaggcccagtgccagggaccatttggcatcaatgccctgttcaacttcatgcacaggagggtctatgctgagcactggtgcccggttctggttggcccaggccacagctgccttgtaccagggctgatcccgcaggaaggcattctcaggacaatccaggcagttgataaccaggtccacagggctagcagggagatctgcggatagaaagaatgcatctgaaaattcctggagcagggagcaggccagaccaggaatacctggttttctagacagtagccctctaatgccgctccaaaggccagccttctcaaggctgtacggctctcacctcctctgccttgcagagagggttttgtatctgactaaccctgatgttagacagcccgctcaggacgctctcagggtccagcagaaacagcagctggccacaggcatttctactcagaagctggcctgtacatcccactccagccagcctgcccttctcggggaattcctcatgcagatgggtcctttcctccactcagcccacactttaggaatagaaggaaacaacccctgttctcccagaacctaaagggcttccctaacagccactgagatggttcaataccccataaaggcaagccagatgacctgatttgatccccaagatacacatggtaggagagagctgacttcttaagttcccctttagacccccatgcacatgcacacccacacaaacttaagtaaaatgtaatagcaatatttttttgtctttttagaaaaaaaaaaaaaagacttcactgcatggaccagactatagtcctctggaacagaacaggaagtctcaacatatatgcaaatctaggattaatctaagaaattaacctgataagagcaataatgagaccaaactgtagggtcattatctccaggccagtttcctgaaacagctaccataggaagtttttctagatagctagagaaaggactgactggagcaaggcagtggtggtttgaatatgcttggcccatgggagatgtcgctattaggaggtgtggccttggaggaagtgagtcatggtaggggtgggctttgagggtctatgtttaagcttcacccagggtgaagagaagctcttcctggctgccagcagaagacagtctccttctgctgcctttggatcaagatatagaactctgagttccttcttcagcatcaaatctgcctggatgctgccatgcttcctgttgtgaaactgtaagccatttccagttaactgtttgccttggtcatggtgtcttttcccagcactgaaactctaagacaactgcactgcatcagagattgtaatccattcccagcatgtattctagtgctcagcctacagttaacgatattgcacaaatcagagactcgtagcttccctacttaaaacacatgcatataaagttctagtgggccatgaataaattgctcaagtggaaccctttgtgtgcacaaagaagcctgtgattctggtctagtcctcctgacttgccaggtggcctctggcagggtctttccctcttggaccatctatctatgctctaatcccattctcacttaacccccactacagtcacaagttggtcctacaccagaactgtgcttcctaagtatcccaggcctccacactgctaaatctagttggtcttcctgggattgaacttggagctctttcctccacatggcttttagttgtaccttctctccctctctaaccactccttggctttagaaacaaaagaaccaaggtcctcagcctttctttcctaacaatctctctacccccacaacacctgaaactctaggctggatccttccttttactccagagtcacaacatttcctgcttgagcagcactggctctaacacctaaacactcaagagacatctaacctgagaggttctttctctgccaagtcctactaaggccaaaacatttagagcattttctcatcctctctctcagatctatttgcattttatgtgtatatatgaatgtgttctgcatgttaaaggccagaagacaatgtcagataccctcaactggagctacatatagttctgagttgccatgaaggtgctgggaattgaatccaggacctcagcaagtagagcaattgcttttaaccactgagccatctctccagcccttcatcttttcatttttaaaatgtttactgggttgcccaggatggcttccaagctgagaatctctctgcctagcctcctgagctgttcagtgaagccattcctatttcttctcttgctgctctctagtaagctgactcttgaacttcacaccaccccctctagtacagctactgtctcactatctgctacctctaattctcataagagaatctcagaaccttactgtaacctgatctcccactcaaagcccagagtgcttgtctagcagctgtgcttggtaagaaatgggtttgagtctatgggtttgaggccatcctggtctacagaatgagttccaggccaaccatggatatacagtgagattctgtgtacaaagaattatcctagtaggtaatctctctgttcctctctgctcaccaatggctcaccattccacctagagtcaaagctcaaacccttgtgacctccaatcccaatgacccaactcccagctctgtccttcctgctatattttactccctaacatttaatactaactgatctgatgttacttgtatgtccatctcttctaaccacagtgtgaaacacatttattgagacagggcctcactatatagccctggaacttgatatacagaccaggatgccttgagctcacagagatcacctgtctctgcctcccaagaactatgattaaagccatgcactaccacacctggctggaaaaacggattgaaaggaaaaaaaaattgtttgcacatttattcccagaactgggaacagtgccagtcccataaatatttatgaaatgagacattgggtatctagctctctcagagtggcaggaaaagggtagggcctgggatttttcttccaggtaatttaaagatgcccttggaagcagaacattgtgtgtacatgcacacacacaaacgcacgcacacacacacacacacacacacacacacacacacacacacactgggatttttcttccaggtaattctaaagatgcccttggaagcagaacattgtgtgtacatgcacacacacacacacacacacacacacacactttccccacagagattctatgtaatcccagctggcctcaaactcatgaacctcctgtccccatctcctaagaactgagattttaggtgtgggttatcaccatatttgagctaatgaagaaaactctccctatgtaatgccattctacttggcaccaccaggtggcactaccagactgtcatgctaccaaagaagtaggaagctctgacccttattgagagccactctctttgtgaacctaaagtaagttattctacccttgatttacacccagggctgatgctcacctcttaggctagacacttgctgcccttgggtcttgctgaagagagacagctcgttggtaatagactccagcatcttgacaaagttgggcaggaagaggatgacttgcacatcatggttggcgaggtgcctcccacaactgatgccctgagcccccttcacatgggggccgcacaagagagctactgtgggcctctggtggacattcttaggattcaacctagaacacaaaagtagacaagcagttattggacagactgggccaatcccttgaatccctatcacagaaacaagtacttgttctgtgggcaccttcctctccattgatgaccaagtgctgggccccagagggaaaacaaaacccaagctctctacaagtccaccaggcctgtaatgtggcacttggtgcttgttcttcccactacttcacccgaactatgttctgaccccaaaacaccttcatgtgaaaaaaactccacatggtggagctccatggtgctccatctctggaccccaggccccacaaggttagctggctccaggagggccaagctcctcactccttcctacagatgcaaggctctatctgcccatgttcagactatgtcctctggccaaacagcccttcaccttttttttcccccgtaatatttttatcaattaattgggaatttcacatcatacacttcaaaatcacacttacatcctagtcctccaaggtctgtctaccacccctgtaactcacctccaaaaaaaagaaggaaaaaaaaaatcctacaagtccaatttgtattgcccatatactcacaggagcatagtcaaactccacgtagtcaccccttaaagaaaaacaagtccttcccacctgtaaccccaccagaagcattcaatagtagaaagctacactttagtatcctttaatcacaatttttaagagctctctttgatggtttcttgtctaggtggttacattttgggtgtggggtggaggttgtcactaaagccttctatgtccctccttctcaactgtgaacctgcagtcatcaatgccactgcataaatagctagctcccttgccctgtacagtcagcaggagcatggaccatggattctgacaatgtttctggcaacagcatgaaccacggacctcagcatggtctccggtggcaatacagaccacagacatcaatatggccttctgctgcagcacaggccaaggacatcaacacgggccgaggataccaatatggtccccagcagcagcccagctcatggacatccacaggtagcagcacaggccacaaacatcggcatggctcctggtggtaacacgcagccttctcccacacctgtcaccactgctgggtctctagtttggccctctccaccacccacgcacctctcttctgcccctccatctttccctcctctccatatctgttagttgtagtggcactggaaactgcagggtgtcacacagtattaatttcttgtccaaagagctttacatgcaaatattcactgcaataagttgtcagtctggttcaaggcctctggtctctgacaaagcataaatactgaactactgccagtgctcgtctagtatatcctgctactgcccagagtcagaatgttcttgcagctaggcagagcatcttggagtaggctctgggtgagtttcaggctgctttacacctacctccttgccctctaggttttccagaggctcactaggctccacctttacacccatagccctcaggtggcatcccatgaccccacccatccgtctatcaggcagggcaagcagcagctacaagctgagggccagtcggcagacccaggacctgctccactcagcaatgtctgactctgtaggaccggctcctctacatgccccagaagcctgcagatgggagtagatgctgggtagactaacccaaagtgctggatctgggcctggacagcaagcaaagccatgggcaagcagagtttttactgagcacaaaagcccttcacttttcaaactctgagctccagattaaggctctcacctctcacttataagtcatgctaattttctccttttttcaactcctattgtccttgattgtttgccaatccaagtttgctcctggagtgccaccaatctgatcagagcaatgctgtgggtaactcctccttacttcctagggagttgtatgaatgaatgcatcaaatgtgattcctaacacagaaatcctcaactgagatttttaggcaacagggcagaacctgccttggagaaaagtcttcctgctagtcaaaactgccatgcctagtcaaagctgagagccaatgctaaggaggtttagatcagccctagaggggcccacaaggtagagatgaggtgaaccatagatgtagggtggaccagtgccaatcatcaccaccacaaaggaagatttacaggtattgtcaagacaaaagggaatttcaggtctttccttcccaatgtacttgggagaacttagtaccatcctctacacagatgccaagctggtctgtgccccactatcctgcttctagagcagcgattctcagcccgtatgtcacacctccttgagtcgaacaaccctccacaggattcatttatcagatatttacattatgattcataacaaaattatagttatgaggtagcagcaaaaataattctatggttgagaatcaccacaacataaggaaccgtattaaagggcagcagcgttagaaaggctgagaacctctgttgcttattcctttacatacatgctgcagagtcctagcacctgactaggggtctgcttccccgggtccttcctaaccccatcgtaagccctcaccagcatgaaagcagattggtgtcttagcactcatagcacctctgcagagtgaaattctggcaccattacaccagcagtgttacctgggtggtccttcaagctccaagccacagtttgctcctcttaaatcatgggtctgtaatatttcccttcaatgtgaagctctgaggagcacataaaattctgttgtgaaaaatggtacttgacacacacacattgaacacagacagaaaacagtgtgtctgacttccaaaggactagtaactgctacaaaggacagagatgcaacttctgagagctcagactaagaaaaacaggcaaggctcggtggtggtggcacacgcctttaatccgagcactttggaggcagaggaggtggatctctgtgagctcagatcagtcaggtctacagagtgaggcaaattccaaagatgagacaggctgactccatgacaggcttcaaatctgcaattcaggagattaggcctaaaaacccaggcttcaggcagctggttagtaactgcactgccatcaggaattggcctgaaacaaggacaatgggtcagcagtttacagccagccaccacaccccggtaatgaaatgtccttagagatggaataagatagaggtcacctaccccagaatcccctaatgcactttaaatctggcctgtaagctcacttattgtctatcttggtaatggggagaccccaacatgctggacttctgcagaataaaacactctatttacatactgtttaactctggggtgccattctttggcgaatcatgaacccttacacaaggacagccagggctacacagagaaaccctgtctcaaaaaaaaaattttttttccaaaaccaaccaaccatagaaaaatcataaatgggttagacacagtagtgaacacctgtagccaagtgcctacaagccttgagagtctgaggcaggaggattgagaattccaggacagccagggctacagagtaaaccggtcttaaagaggcaaaggcccagcggtcagaagcagcagctagaagcgcacaccagagagaacatgcgtaaactctgccccacactgtttctagaacgccacttaatgacgtcagaaacccttctcccagtgagtgcattccaagacaatccatgtggctattcctagactaggatgtgcagcaagctatcccccttgggggtccccttccctttctacacaagagtattgggcataggaaagaacaggcccaagcaaagcacaaagaggaacaaatactcataactctacaaagcaaggagttggggccagagtaaaacctctccttc

SEQ ID NO: 1099 - DNA, 1779 bp, Mus musculus
tcggagtggggagtggggcctagccgcagccggagcctgggagacgatgcatcactgtaagcgataccgttccccagagccagacccatacctgagctaccgctggaagaggaggcggtcttacagtcgggagcatgaaggtcgactacgatacccatcccgaagggagcctcccccacggagatcacggtccagaagccatgatcgtataccctaccagcggaggtaccgggaacaccgtgacagtgatacgtatcggtgtgaagagcggagcccatcttttggagaggactgctatgggtcttcacgttctcgacatcggagacggtcacgagagagggcgccgtaccgtacccgcaagcatgcccaccactgtcacaaacgccgtaccaggtcttgtagcagtgcttcctcgactctcatgcccagcttcttctttctcacagatgagatcgtggggaacctgggtgaaggcacctttggcaaggtggtggagtgcttggaccatgccagagggaagtcacaggttgccctgaagatcatccgtaatgtgggcaagtatcgggaagctgctcgtctagaaattaatgttctcaagaaaatcaaggagaaagacaaggaaaataagttcctttgtgtcctgatgtctgactggttcaacttccatggtcatatgtgcatcgcctttgagctcctgggcaagaacacctttgagttcctgaaggagaacaacttccagccttaccccctaccacatgtccggcacatggcctaccagctctgtcatgcccttagatttctacacgagaaccagctgacccacacagacttgaagccagagaacatcttgtttgtgaattctgagtttgaaaccctctacaatgagcacaagagctgcgaggagaagtcagtgaagaacaccagcatccgagtggcagactttggcagtgccacgtttgaccatgaacatcacaccaccattgtggccacccgtcactaccgcccacctgaggtgatccttgagctgggctgggcacagccctgtgatgtctggagtatcggctgcattctctttgagtactaccgtggctttacactcttccagacccatgaaaatagagaacacttggttatgatggagaagattctaggacccatcccatcacacatgatccaccgtaccaggaagcagaaatatttctacaaagggggcctggtttgggatgagaacagctctgatgggcggtatgtgaaggagaactgcaaacctctgaagagttacatgctgcaggactccctggagcatgtgcagctgtttgacctgatgaggaggatgttagagttcgaccctgctcagcgcatcacattggcagaagccttgctgcaccccttctttgctggcctgacccctgaggagcggtccttccacagcagccgtaaccccagcagatgacaggtgcaggccagcacacgaagagttggagagctggactgggctgctggccccttttctccagcctctcccactggcctcagagccagagccaccgatgaacagtgcaatgtgaaggaaggcaggagcctgcaagggaagggggaatgtggtgcccggctgccagaaagcacagattggacccaagctatttatatgttgtaaagttataataaagtgtttcttactgtttgtaaccccctggtaccagtgtgtccatctccaggctccttgccctctccctacgctgactgacttattaataaagtctttcttagcagctcagc

SEQ ID NO: 1100 - protein, 475 aa, Mus musculus
RSGEWGLAAAGAWETMHHCKRYRSPEPDPYLSYRWKRRRSYSREHEGRLRYPSRREPPPRRSRSRSHDRIPYQRRYREHRDSDYCEERSPSFGEDCYGSSRSRHRRRSRERAPYRTRKHAHHCHKRRTRSCSSASSTLMPSFFFLTDEIVGNLGEGTFGKVVECLDHRKSQVKIIRNVGKYREAARLEINVLKKIKEKDKENKFLCVLMSDWFNFHGHMCIAFELLGKNTFEFLKENNFQPYPLPHVRHMAYQLCHALRFLHENQLTHTDLKPENILFVNSEFETLYNEHKSCEEKSVKNTSIRVADFGSATFDHEHHTTIVATRHYRPPEVILGWAQPCDVWSIGCILFEYYRGFTLFQTHENREHLVMMEKILGPIPSHMIHRTRKQKYFYKGGLVWDENSSDGRYVKENCKPLKSYMLQDSLEHVQLFDLMRRMLEFDPAQRITLAEALLHPFFAGLTPEERSFHSSRNPSR

SEQ ID NO: 1101 - DNA, 51399 bp, Homo sapiens
  misc_feature (1)...(51399): n = A,T,C or G
ccggcagcaagccacaggccccgccacgccattggccaggattgagtcacgtgccctccccagagccaatgggagcgagggggcagggtgaccgggaatgaccttagactgcccgccctgcgcggagggagatccactacaggctgcgcctctgcccctgcgaggggcacccctgggtctctgggaaacggaatggagggtcttatggaagagaaggtttggaaccaccgctggagggaaggggagaagaaagcaagcaggagtggcgcgaacaggaagggactagggatagaagccgggcttggacacagtgaggcacgaaccccgacagacacagagacagacaaggggtgctgatctcctcactgggcggggtgggcaggaaaaggaacaggagctggagctagagcgagggctgcgagcggcgagtggatacccggcctcagggaggagcttccaggagggcaggggtctcctttggagcagcaccggggacgtttgctcggcaagggctttttgtgcgaagtaaccgaagccagtcaggctaatggcggcagagagaaggatttattcttgcacccagggtgtgcggaggagcccaagggcatttggacctgtgttgacgtccggaagggcccggaacccaggaagctctgcccgcagagggtattcctctccctctgaagaccacctcaaagctcaactttatcacctccacgcatgagaccgccggcggctgaactaaaatctcaccatcccaattccagtttctgggaattgtcacctccattcgctctcattagaaatccagcttttttcacgaggtgaataacagggcagttgacagttcccaagttttctgtgtccaatcttcagccctggagggactcttctgctccaagtccagcgatcccgggagggggcccactggtccagtacggctcagtacccagccctggatccaccagctgacgctggaaggagtgggtcatgaagaactcagcacgaacgcagctgggtacgaattcccagagatgtcctgtccctccacggtaccaaggacccctcctttaagaaactgcttcactgaaggcgcagatggagggagggatcggcaacagagttcagaggggttccgggggcacatggctcagccggaggaagcaggctgaggaggggcgttcagaatggccagatgacctcgaggggaatgccaagcctcagcccactttgcctgtggctcctgaggatgttcatgctgtcaagctcagaacagctgagaaactacctttctggggcagattaggggaccagggggcttagttgctggtttgctgtgtgacctatgacaaactctgggcagtttgtctgtgaaatggggactctagtgtgatcggagacacaagtgaatgagaactcactttgaaatgtctaaagcccagtgcctaaggccttccttggcaagacagagagtccctggtgggcactgtccgatggcattagggcagtaattgggccaaccaagcctacaggcccgcagcaccccctatggtgttgggcagtgcctgcctagctctactcttagccacagggtcccctgggaaagtgccaggtggtctcatccaccaagagccatattggcaacattgtgccaacatgggcatttcaggcctgtgtcagggaggggacaaggagtggtttctgccagggaggcctcagactgcagttgcctatgacaggctccaggcttcaggcctcatagaaaccctggccttgggggctgaaggccagccaaacgggcctcccctcttcccaagtccttgcccagccgcggttgcctaaggccttttttttttttttttttttttttttgagacagagtctcactctcacccaggctgaagtgcagtggtgcgatctcgactcactgcaacctccacctcctgggttcaagcgattctcctgcctcagcctcctgagtagttgggattacaggcatgtgccaccacgcccagctaattttgaattttttagtggaaacagagtttccccatgttaaccaggctgttcttgaactcctggcctcaagtgatccacctgcctcagcctcctaaagtgctgggattgcaggtgtgagccaccatgcccaactcactgaggcctctcaattcagcttttctatgccaggacccttcagctcactgggcgggggtgcagggcctgacctcaatctcttgtgctgcagagtgaggctgtgaatctgcctcctgctggctctgggcacagtctctacactgcctgggcactgcccctggcttccaacttttctcagatgcccttctttgggctccagggccatggctgggatctgggggcagatgagacagaggctgataccatgggggtcagagaggcagggcagggggtagcttccgctctgtccagggatggggaggccagctcaggaatccatttagaaccagtaaaagcctgagctggaagggcctttctagccttctgtttcccctctacaacctgcagatgggaaggccacgggacagaaaggaactgggcagaggtcactccccaccccatctagagggtccacatatgctaccttcaggggctgcaaggtggaggtggctggaggctcctgtcctggtgctggagcccttggtgctcagacctgcagcagctcccactccctgaggacacaattctcagcctgaccatcagaactcttagggtctcctagaccccatcggcggctctgaccctcttttatgaaagcacccaaagagcacctgaggcaaaggacagcatcccccaccctattgagctcctcattgcaggagctcaaagatgatgacctcagtcagaatgaaatggtatttaagcacaagccagtagctgttgccatcctggggaatgtgctgtattgtctgtcactggcagcattgcattacatcaaactattgcctgaatatcacaagaagtgcaaacaaagccttatggattgaacattgcataaaataggccttgtgtgtggcgcagtggctcacgcctgtaatcccagcactttgggaggcccaggtgggtggaccacctgaggtcaggagttcaagaccagcctggccaacaaggagaaaccccatctctattaaaaatacaaaattagccaggtatggtggcgcatgcctgtaatcccagctacttgggaggctgaggcaggagagtcgcttgaacccaggaggcagaggttgtggtgagccgagatcacgccattgcactccagcctgggcaacaagagcaaaactccatctcaaaaaaaaaaaaaaaaaaggctttgggactaaagcccgtatgcagccgcccctgggcacatatacgtggttttatgactttggtactgactcagcctaactggaccccagatacaggagaaactgagaaggacggagaacataagcactgtccccggtgcactgtgtcccatgtcatcctcacatcaatcctgtgtcataggtactgtccgtgtttccattttacagaggatagtgaggcttagtgaaggcaggacttgctcatgctcgccaagctggggagtggtggagagtgaagtgtaagacttctcggttctactgccattctccttccatccattgctccaggcccaggggcccagatggtctgattccctgtgccccacagcccaccctcctgctgctgctttccctggcttcccctcttcagagagaagaaggcagaccaggagataggtcaggcctcaggccgctgctcagccccacccatcctaacccctgaggggatgagagggcagcctccacaacgtgtccctaaatgcccctgcccccctgccccctgccccaggttctcagagaagaggaagagctgtgggggctgaggagcatctctgggagggagggtggggtttctccccaaagagcccctcagatgcaggcacccctcaccccgcagtcactgcttctctaccagctccttttcagctgctgctgcagcctcagtttctcagggaggctctccaccagcttagaggtgggcggggggaagcagtgaacacgttccaggctgagccctcccagtgggcagcaagggcttgggaggaacttgagtgacggagtgtggggaaggaaaggtcaaggcctgcatgggcaccatgcggcaggcagcagggatcgggcatgggggagcctgtgggagccatgcaggccagtcggaagcacagtgcaggggggcagctgctgagcacctggtcctgggcagcctccagggcccactgctcagctctcagctctgagtctcaagcttccagcacattgcagaccttctcgagctcagtctgcatctcagccagctctgaacccacctcctgcaaagaagtctgtgatggaggagggtggggctggcgcgtatcttgatctgcaggctccccaagaacttcgctcccccttggattcagagctccagcctcacaggggccttcctagggactgttcttcgccccaaagaggccaccatggcggcatcaggtgcagtgctgacggaacagcaccaggggagggggcaagagggctcaccttcccctccaagctgtgcaggtgactgaagtccagaacacttgccctgaacccctgatccttcactccctcttttaccctgagtcccgcagcgctccccatacgggtagtactgcctagcccaggagcccctgagggcaggcctcacatcgccctccatctccacatcctttccagggtccctgcacagtttgcctgcacagggctgggcccgcaaagcctcgctccccaacgcacttgtttcatcacttcaattggtgagtccaccctgccaaggagtgaggcctagtcccctctcagggccacgctgaggttgtacgaggacagggcagccggggttacgggcctgggatgagtctaggctgagtccttggtgctcaatggagaacccccatcccaattcattggttccaacaagccaggcttcctactccaacccctgccccccggcccaggccctgccttcacttcacatggtccctgtctcagctcctccagctcctggaaacaagggcccagtgtggtcccagagggcccagtccacatggcaatgggagaccagagccaagttctctgcctgggaggtcccacctccatccagcctgatctcagggagggcaaccagggctgccccacaccagctctcacccctggatggggctgtcccagctccaccccagtctgcccttgagctcacccattggcctctggtggagtccacactgcagactccagctccttggcagacctgggctcccacagctcctgggggatgggaggcagaaacgctgctggggtgtggcagggacagcaggaccctgtccccttgcccccaccccgttctgtgttctgtgcatcattagctccaccaaggccactgggtaactcaaatgtggcacaggcccagttctatacagctggggagaccgacgcagggacagtgacccagtgagtaaactgaacagggtcataggatcactgagtgtcagagctccccagagtccccccagcaccacacccaatgtacagatggaacctgagccccagagtagtgaggggcttggccaaggccactggccagtttgtggcagagctgggactgccacagtcccatcagtgtttgtggaacccgtcgctttactggccagtgaggattcccagcggccccacccacaggctgtggggctggaggtgtgtgggtgggtcttggctggtgcccactcaggtaaatgcctgtgtagtacccaggagaagccacagtgggctgggtggggcaggggtgaggtgggacccacctttcatttgcagactccgggggctggcctggggtctctgctgcggtctgccctgtgggcagaggggaggtggcaaggactcaggagcacttgggctgctccagggtggctgccctcccttcaggctggcaggattgtccagattcttatgtccctgtccttgggtgggcaggctcaggccaccttgacctgggggcacccgaccctcacccctagcagctggtgctgagggttctggtgccagtggtggccaaagtcctgcttctgtccacaggcacccagctcaagctggagggcaaggccctttctgttcacggacagatgggccatagtagccctggaggccccacacccctgggcctgagctccccggtactcagggccagggtggggagcttgggacccattaaacaatcaggaagctgaggccccatgagaagagctgtggctgtggcacagcccgggcctccactttattgcacaaggcccctgacttcaggcttggggagggctctagggtacttaggaggggttctttgggggccctgactgtaggtggggccacctcacaccaccccaggcagcccagctcctgcccaccttttgcctctggatcccagcagccatctggtcattctccctctccagagcctgcatcctgctcctgtggctgactggggaggggccagctgcatccccatctaggggccctgctcccccatcctctcatgcctgcagaaaccttcaccctggctcttgggtttgggcaggtccagcctgcagaggggagcggatctcctcctgggccctggcctgccctccctggctggcatgtggactaggggcctgggggctcactggatggtgcccgcccagactcacggcagctcctcctgcgtgcactctggcctgtgcagctgtgtaagggtcctgcggttacatgatgggaaaagcaagagggagcatctggggccctgaagtcccaagtcacacccaaaccaaaccacccagccaggaagatagcaggaagcaaattggaggcgttctgggttgaactgtatccccagcaacaacaacaaaaagatatattgacatccccagtacctcctaatgagacagaatcattacagaggtaatcagactaaaatgaagtcaataggctgggctttcatccaaggtgactatacaaaggggaaatgtggacacgggcacacacagagggagacaccacgcggacatcctggaggaatgtcaaagcctgctggcaaagcaccagaagctggggacaaggcctagaacagaccctccctcacaggcctcaggaggaaccaaccctgccgacaccctgacctgaacttcagccttcagaaccaagagacaatgaatgcctgccattgaagctaccgtcttcagcactttgttatcacagccctagcaaactcacagagggtaagtgggatccagccccatgtggcagctctctggccccaaaaggaccctgacttcgaggagaactttctcctcaaagtgaccacacctgcagcagcaggaactgtgcaatcatagtggctaatgcttcatgactgaatgccatgtgttttcacgtgcttgtcaaatgtcatcctcttaggcactcattcagggaggataactgttattttcacttttacagataaggcccagagaggcagaggaactgcccaaggtcacacagctagtatattgtggagccaagatttaaacccacaatcttagccactaatctggggacagtgcagactactgaatccttggatggaagacagactgaggtagacacccagagagggttgggtggaggagcttgaggctggggatgggactggaggtggagcatgccagaggccctgggagcgctgggtgctgagcccgtgaaccccctggccagccggacgttgatgcaatatggctttgtccagaccctatccagctgctgccccatctccaagagcctcgccctgctggaagtgcactgctagtctggttcatcagccactctgcacaggacccctgcccaggacccagggtctgcattttaggccatccttgctggataggcccagagcccagggtccccacctgcctgtagaaggtgagtcctgggttggccttctaggggtccagggagggagtaaaaatggcctggacagtctctgaggggctggaaggccctgcatgtggggcccaaagtggcactggcttatgcatcacgtgcaggttaagtgcatccggctcacctagcacctcttcctgctaggagacaaatctgccgagggcccagccctctgtcactccactaccttctcactgacattgcccactgcaagtcctcagacttgaccaaagaatatagcccatccaggcgctgaggatatatcttctgaccctcaagggtctggtttgagaaatagacaaaaacaaacaaacaaaaaaaaaaaacaacaaaacaaaaaactgagattttcctctgtacaaatatatagtggcagactacactgcagacttaaggaacagccccctatgagcacagttgtgtacccatttgagatacactgatttagaccaactcaacctttatgaggcccaaagccagctaagctttctctccttttccttccatcgagatcagcagatcagcttcagtcaggtgccttgtggcagagcgtggatcccacatggggtccttagaatactacttccctatggctcccaggcacctcgttggtgtctgtatctctctctgtgtctgtgtgtgtgcatatctgggggtgtctgcagatgtctgatgtgtatcctgggggtgtgtgtgtgcatgcatgtctgtgtgtctgtctgtccatgcacacatacacttgcccaggagactaagggatgctgaccaggagaaggcagccaccaagctggaggtgaagtcaggtggacaggagctgggacatctaaaccctagatctggcccctgtcccatgtccatagtaaccccctcacccactctccttctcaagtggatcaggggctatttacaacactcctcccctgtctctctgggtatatgtatgtgcagtttcctcttgctgaaatgcccttcatttcctctctcctcctggaaaatgcctgtctatccttgtgtgagggttcagaggctcagaaaccccttctctgggagggactctcctatctgccaccccttaaccagctcccactgtgcctcttccctcatctggcacattaaattattacttgcaaaataggcacagtggttcatgcctgtagtctcagaactttgggaggccaaggtgggagaactgcttgagggtcagaagttcaagaccaccctgggcaatgtagtgagacccccatctctacaaaaaaaaaaaaaaaaaaaaaaacttagccaggcatggtgatgcgtgcctgcagtcccagctacctgaggcaggaggatcgcttgagtccaggagtttgaagctgcagtgagttatgattgcaccactgcacctcagtctgggtgacagagaccctgatgcaatcaatcaatcgattataaatcaatcaataataaataaataattgcttactcaattaccgggtgcccccaaaccataagctgttgaggacaaggagtgatctgatttgacattgcttctgcacacagaagagggccaggcatgtagcagatgctcaataaatgcatgctgaaaacatggatggagaatgatggggcatgatgaggaagaggcagaaaatgggaaggaagtataggatcaagatgggggcatcctaaggaggggtaagagactaattggtttgtatgggaaagactgggcagtggggaagacaatggggagaacggggttgagggggtggagaagaaggtgggagacagtgcccacctggggaggccaggtcccactctgcctctggagtctctgcagttcctcctctttaaatttcagggcaactgccagccggtgccagcgtgccttccaatattcagccatctcctcatgaagcctgggatgtgattcttgtgcctctagctctttcctgaggggcactggtacctccaggacctggagtgtactggaagaaatggtgcagtccaggtacagcatggaccccagatcacccccaccccactccctttcagtgattattgtcttatgaactaggagggggagtggggcagagatgcctctttcatggctccctgcacacacagaacccctttgtactgggcacttctactcccaaggaccctgacttgcacccagcagctaaggtcatctcacccccacctcccacctgcccctgggccagcaggaggggcttggccatatgtaggcgagacaggacttcttgaagctgaaagatttcccaccccataaaagagccagaatgtgacaaccaggagcgctgatacctggggaagggagactggctctggtcgtgtgattccgggtttagggctctgggccattccccctcagccagctggtgacagagactggcccaccgcctgctgagagggccatctcacctacagtgagaacagagcccccaccccagcctggcttggacactctgaggatgggcccaagcagccacctaccaggactcttggcccggggccacacccagtgctgctagcagccccaccttctcctgaagtagccaggtgtgctctgcctccagggcctgcaatggccccccaacaccatctgctctccctgcagatgctgcagctgctccaagcaggcccctagttgctggtggctctggcccagctcttctgagtctcttgttcacctggggagatccccaccccaccgagttgtggctcagcctccaccagggttgtggagctccagcctttacccatgcagcccctcctcagaggccccgaactccacttcctctgggtctcagcccttccaggaggcctctctgaccaccccagcccgcagaggcttctctacactccaggctacgactctggaccagtgcctggctgcacactagcaggggggccagttatgtgaagatgaggatggtgctctctggagtgtcactgtgtggacgccctgctagaatctctctctcctggtcattctcctttcctctgtgcccctagagccccttgccctacattggaatcccccaggaatggggcccaggctcccttgcctctgccccctggtacagatgggcatggcctggatcagctaatgcccagattccctttcctgtggggctgcccctgccagctgtcttgaccaacctcagtgagtatcagcaactgctcctgcagacggactgtgtcctgagcctgggcaggggtctcagctgctggcatggagactctgggtcccgaagctcctgggccctgcctccatcccagctctgctcttggatctgcaggcctggcaccagcatctcctgtagatacacttggtccagaatcctggggtctccttccagcttccagaccacactggggtggtcttggcagaccgttgatgcctcagggcatgttgtggcagggtcctggccccaactcaagttatgactctgaacaagctctcctctgctctctggtctcagttttcccatctgaaccaggagggaagtcactgaatgatcccagggtattcccaaatgttggaagaggatccctctcttggctggactaagcccctgcgctgccttccttctctagataatgcttcaataatgaggaccagagaataaagtgtggggcagagtcaaaggtacagcagggccagtgcgcagggcctgccatgcacccacttgggggatccccaggctgggctctgggccaacaggctgttgggtcatttggtccaaatgccgctaggccttttccacttctgtctgcagcagcaggatcctgtgggtagaagggatggtctgcctgttccctgccaccccacccctcccccacagcccagccccactcacttgtcttctatgttctggtctggcctcctccactcagcctgtccctgggatccctgcatctggtgcctctcctgctccaggcaggccagggagcactccacctgctaggaggaggctgagtgggagggctgaaggcagcacagagcctcagataggtagggctagcttccctgcctcccaccaggcagggcagtgtctgcagcctttgataacgcaggcggactggcagccagcagcccagctgacagcccaacatggacccatgccctggcttatatacaagggactgtgccctggggccctgaggggctgcttttggctgttatctatcacgacaggctccagctgtgcatctctacctccagctgggcccgagatacaccgcctctccagctgctctccagctgctgacagcttcagggtggaggccagcaggactgctgtggcatgctaaagggcaggcagacatgaggttgtcaactgggtcccaagggtcccccaggcctggtagggagcagtggctccaggtgggccagctgtgagctaagacacagagtcactgaaggcttgcgtaactgggccatcacacggtgtccctttcctaccctcacatgaggcagagatcctggtaaccttcccaagaaccctcagcttgcacagccatctccccctctctggggctcgcctgtttcactcggggagattgggcttctaaggaagctcttcagtctatggagctaaaaccagcccctccctccctcagattctccctggggggccacagggaccctggcccttccttcacctccagcagtgtccctagccacccccagcatatgcctctcaggcaacaccctgcacccttccaggggcaccattcagagacatctctgttcaacaccgcagccttgctggggactccatttccctttctcctctgggtgccccagaccccggaaagcctccctgagaatatggcaccagatgtggacaccagctctgggcattctggagcttcagcctgctaaggggatcttgctagctcaggggacctcctttcagctacagaaagcccaggaagaaggaatgggggaggacagggcctcactttctgctttagggaccagccaagtcccagcttgtgctcccgcctctgcagcaccagggcttgctccgacagggcctccggcactgcccgaagacggcttgccagctcggccctctgctgcctgctttctgccagctgctcccacaggtccttctctgcccgcctccagtcccgctcgggggccctgttggagcacatgccagggaaagaggagccagacttcagcccaggccccagggggctgccatgcccaactttcctatgctcacctgcacccttcagtggggcttggtgggcagacacggtccaatgccccgaggaaataggagttccagagacagcgggcagggctgggcatcaagtccatgggctctgcctcagtgggacctgagaacaggacagatcctggagctggggtagtcttggcttcccaaagcaccaggctctgaggcctcttctcagactcagaattgaggccctttggctgagcacgcactaaaacccttcaaccctgatcctctggcccgaaagtctcctggtgattggaacttcactaaacaccagcctcaactccactaaacagttctcagttcccagtggtttccatgagctgtgggtgctgccaggggtggccacttgctgaacacaaaccccattatcctcacagcagctggtctggggaggcgcagcaggcactcctgaggggaaattggtgcccaagtccggcagggagtcccgtgaggagctgcaatccccacccaacactgtctgcaccagagccacgttcccccttccagtgtggaagtctggaaatggcaggggagcatttgggggccaccacagtttagctatgatgtgggggtcagagcccttaagtcaagtcactgctcaggtacctctctggcttccatagcttcagctgtaatatggaggccctgacggacctctcacccaccagcttggtgaggaaggtcagagggtagacaggggctattctgccagtgttgccatccctacacccctcaccatcaccctcctcacctctagggtctgggcccaagtccactgcctcccaactcccaaccctgggcacgaggcaccctgccctggctctgaaagggcacaggagttgtcttcacctaagcagtggttacacctagcacctctaccacccccaccctgacctccccactcctcacattcccaggccttctccactcaggatggcaccatcgcccaccaggccttctccccactggacagcttgactctcctctccccttactccaggcccaggctcctgcagccccctccaaaattgtctcccctccaaaatgtcactgccacacaaggcttctctaagacagaccatgaggactggccgctgcccccacctcccatactgggtacagctcccacaatgccactctacctgggtgctctgtcttgccagttagaagtgacaggctttccatggcagccccctgcccttagtgagaagctgagctgtgcccagcttggtccgggaggggctcatggtccacagaatggagtgcacatgcaggccagattgtcctgagcaggggggcaggccagggcagccccaggaaggctttccagggaggtgaccctggggccaaggctcagaggtgaattaactgcctccagagaaggcaaagtcagatgaggcagacagaggagacagtaaggacaatagaacaaggagggcatcagagcagctgggcctggcgggcagtgaactgagccctaagcttggtggaagtggaggtggggggcaaaagggagaccaaaaggggtgagaggagctgtggggtttgggaggatgcagggcagcggcacctccccagtgcccttgagatatgctacagacctcaactccacagaggctgaggacccagacaggagcttgggcctgaggggcagtggaggtggagcaagcctcctctgaggtggggatgggagtggaggagttacccaaacctcacctgggggcagatctttctccaagtttctgaaaggtgtgaaagtcacaaaagaatgaagctctaagggtagaatctcaggcaggatggcctccaggctgcaaagtgtggagagggagacagctgggagatggcttctgttccacctcagaaaaagagagttgcttcgtggctgggaggtagggactcctggattctcagtggtgggcagttttgtgggaaggtgactaacttaccccatcagagcctatagctcagggcagggctggggacagaagcttctctgagaacatccatcccggggacagaagcttctctgagaacatccatccctcagggctagtatcctggagccatggaaactcaggcaacactaagtggtgggaggaggagacaccagagaggcctcctactccacctcatctgagctgatgaaaccccgagatggaacctggctagtgtggtcgaggccatgggtaccaggcaggaatggcatctcagatggcctgggatttttcaaaatcttcagcttttgagataggaccttagggggcaggacctcagcagccaatctgggtcacccactgtacactgaagcggctcctaactttcttttttgagacggagttttgctctcttgcgcaggctgcagtgaagtggcgcgatctcggctcactgcaatctctgcctcccgggtttaagtgattctcccacctcagcctcccgagcatctgggactacaggcgcgtgccaccacgtctagctaatttttgtatttttagtagagacggggtttcgccatgttggccagactggtctcgaattcctgacctcaggtgatcatccacctcagcctcccaaagtactgggattagaggggtgaaccaccgcgcttggccgattttttgtttattttttgagacagggtctccttctgtcgaccaggctggagtgcagtggtgtgatcatagctcactgcaatctcaacctcctgggatcaagcgatcctcctgcctcagtcccctgcaaggagctggaactacaggcatgcgccacccagtccggctaatttttgtaattttttggaaggggacccagttttgaattagcttctgttgtttacttcggatagccatggtggagctggcagagatttaggggatactaaacacccctacaaatcacgccttgaaaccccccgtttcagggagagccgctggcgaaggacttgatgcgcagccgcagctcggaagcggggggctcccctgcgacacctccccgcttcaggggcgggcccagacccgcggggaggggcatgggcggggccgcggctggctggcggccgccggggcggtgctggggaaacccttggcgcccccgcggagcggtcccaaggagggggcggtgcctggagggatggtccgccccgactgcgggtttctagccctcgcgtggcgtggggacaattaggcgccacgccctgtcgcttcactgcgcgacgctcgcgaggccggggacgccactcccagaccgggcgggacgcgcacgctcacagtgaggtctcaaaagatccccacctcagttttctcatctggaaagtggggcctcgtaatcctgtccgacccggcgcgggacagtaggtgtcagggattttggtgaccccacgctcgaggcctctgcaaaagggggctgtccagtggcccagagacgcagccggcggggcttttgtctagcgggggagtcttaactgagaggccacgcaggccggcaggaagccgctccacaggagggggctcaaggagaggggatctcctccctccagactccggccccgccagagtagctctagggtatcttcccagaaactgccccgcacgcactggcgagctgggagcgccaccacggctttcaaaaaacccgcacacaccaagataataatgtgtcgttcgctcgtttcgcgcaagcggagtcgcgtccgccttcccgagctccggcacacagacctcaggccgctctcgcgctctccggggccccgagaacaatgcccgtcctctccgcgcgcaggagggagttggcggaccacgcggggtcggggcgacggagcgggcccagccccacggccaggtcggggccccacctctcggctctgagagcccagccggcccgggccgcgcacctgtcaggtcgggggacctacgtgcgccgcgacacggcgggaggcgggccgggccaggctcgtcccctcggccctcccggaactagtctcctaggccgcggcgcccgccggagcggagagggctggtgccccggagccttcgagtcgggggctagagcggccaggcctccgagccgggtcgagccgaggctggcgacggctgcgtcacgcgagggggcggggctgccacgggcggaggtcgcagccggaagcggaagaggcgctcggagcggggagtggggcctagctgcagccggagcctgggagacggtaagtgtgggctggggtccgcggcggcgacagcggcggcggcggccgggggtgagtcggcggggcaggcgcgctggtgccattcggtctcggcctactccctttctttctcctcttcggcccatatcgggccgcgacctctcacccctgacccgctgcttctgccccggagggcggtcactgcagaccctgacctcgaccccacggtgttgaaggcggagcctgaacggcctctggggccgctcaagggtccagtttgggctctgtgcctgcccgcggaatggggtcggggtccgacgtagaagagccagagaagcccttcagacccctcccctacccctggcttcaggcttagtccgcagatgactcctcccttggcggcctggagtttgattctggcccagtccggctttccctctgtccccgggtctcccctcggcgccactggtggcggttacaggggatgggactctgagaccccctgggacctggggcggcaggaagggacgcgaacgagggcgcaggctcccctgtgtgttttgttgtggtggtagagccactccagcccggaggatgggctaggccaagctgacagttcaaatcccctggctgctcctccgtcccgcccgggagtctctagctttagttccgggtgtgggtgccctgatgtggagctggggtggaaattgcctgaaccaggcccccatcagaggcggagttggcggccttccagcttcccttcttgatgcccttgaaaaggaggagcgtttcaccgttggtggtggaggcttgcgaggtggcaggtttgaggttgcagtggtagggcagtccagccaaaaataaccatgggtgctggggtggctggaatccgggagggcagccgctgacctggctggctgcacttctagtcagcccagttctctggccaggaacagcaaatgagaagccgacaaggcctgtgctcaaagttgacatccttggcttggttttcttcatatcacctttttcctcattgtgcagagcagagcttcccaaagcataattgtggcctttagctgctttttaaacaagctgtttgctgaggttttcgagaatcagagataattgagaaatgggccctagagccctggctgggaggatgatatctgctatttccaatattttacttgcctagaatgtgttaaaggaaggatactcttctctgttattgctttgtgtgtggtaccttataactctcatgcttgtcatctcttttgccaggctgagagatgttatctccattttccaggcatgctaaccaaggcctagagtgacttgtctaaggtcatgaggctggtatgtgacagcactaggatttagtttagttttctgccagagctcttgcctcccagtttccttggaagggacttataaaatgtctgtaaggcatttaacacagccctgaagtgttacctggaactttcagatgttcatgaaaagctgccactagtacctctgtgggcacaaagctgtgctaggcatttcacttataggagagagatatttaatcctcacagaaccttgtaagagattactattcccttgttgcaagatgaagctgacggtcagagtagtgtaataatttgttcaaaggcacacagctagaagtggcaagccatgattcagattgacatctatatgactctgaaattttgttttccattgatgtgaatatgtatggacataagaatcttctaggtcccaggaggtagtctttggcgtggtgtgactgtgactgtgtcctccagctctggtgtttgtctgcccagtgaggatgggcaggaccatacttgccttgtggcacgacatgtgccctggccaatagagcatcttctgggtcaattagtggggtgtgagttcctgctttcattccatagcttgggcacctgacccagagtaattgcaggaaaacagtgaaatattagtcagctgattaccaaaacaacaaatctaagcttttggggaggtgatttcacaaaatatttatctccaaagacttcccaggtacacgggggaagacaagttagtggggagatggagggctttcttagggacacggagaggctcccaggggtttggtcacataggcctcactgtcctgctcaagcatggggagctgttctatgctgcttttctcctgacagaccctgctggtgagatggggcagcctcagtgggtttgtacaaaatgtgcttggccaggcaagctcaggactgaccatgactggaggttggctgtggccaagtgtgagtgttgggaagaaggctggctccatggaggcagtcagggattgacgtatgggtggagcaggttgctggcctcacatggccagctttctccgctggtggcagatccagcctggcaatttcatttggtggatataagtcctcactgaacagggatagtgaggtggggctcttttacctgccagatggctaaccctctggctatcctgggataggcggagggtaggatactagagccagagagctagaagaagggacagtaacggtactgttggataaaggcaaggcacctggcagggcactgtgggggtctaaaagggtgctaaatgggcctctggaaagaaagttagatgcgctgggtccacgtccccttgggttgaccctcaggagggctatggaatgtttgtgaggcctgtgtgcctctttctccaagggctgctcttctagtctcttgtggctcctcatgctcacttgtggtccttactcccttgagtggggtccagttcagggccctagccagacagcgttcagcttctcaaacttgagggctttgagccctcgcctcctgtgtacagccctttgcctggcctttggctttacagagcattcacttcacgggaccgcccccccgggcgggagggaatagagtgcaggaggctcccctttctcctgcctttgatctccctgtggtagtgttcaccgtccccacccagggttactgcctcagcccctggccctggctcacccagttccctgagcacccaggccaccaggctagtgatgctctgctgggagctgtttgtttgttcactggcagagaaagttgtttcctattgtctgctgtttgaccagtgtgacctcagagttcttcttcacttcataaacctctgggaggggccgccttcaaacagaacaatgggcctcttcaggagcaaccgggaagccccagcagccccatggctggaggtggctggctgtgtgtttagcagggctctctgttcctcgtggcctagatgcatcactgtaagcgataccgctcccctgaaccagacccgtacctgagctaccgatggaagaggaggaggtcctacagtcgggaacatgaagggagactgcgatacccgtcccgaagggagcctcccccacgaagatctcggtccagaaggtgagagggaactagataggagggaaagactccttctgtcagctgggctcagctgtggcagctccagactccttgagatgactccatccctgcccagctgtccctggatccctgccctgtcctctttgggctcctccactaacctcacctgcatgccttggcctcagcagtagctaccatccttgccgcccactctttctctgtcttggagtgccttttcttctccccacacattcccccattttctaggccagcatctttccgcttaacctcctaagccttccttggtgaggattaggaacataacctcacccctggaaagtttgctccctgggcctatcttagctcccaggtcaaacttagagttgcagcaggccacagggaactctggaagggtatagaacccttggaggcactctaccatactccccttcccctgtacccctcctcctacagctggaggatgctgtcgttggacagggctctggagggcgggcttagtacctttgcaccctcccctctctgcccacttcccaccagtgtggatgcttttagcacaggctgtccccctttagccctttacagtggccttaccacaggtctcttgcttgctaacagcaaggacccagctgaccagcgtccccatcccccttttggcagccatgaccgcctgccctaccagaggaggtaccgggagcgccgtgacagcgatacataccggtgtgaagagcggagcccatcctttggagaggactactatggaccttcacgttctcgtcatcgtcggcgatcgcgggagagggggccataccggacccgcaagcatgcccaccactgccacaaacgccgcaccaggtcttgtagcagcgcctcctcggtgagtggtagccagagtgtgctggctggggcttaaaggcctcatctcttcctagccttctctcaggctggctggtccgggtgagtactgccagccctgtgcacgtgcactggtgtgcgtgcatgtgtgtgtgtatgtgttgtctggtccaggtgtagggctgatcacagggtcctggcctctgtgtcttctggctctttccagtggcaactgtaggaactctggctccgatgctggctggcccctggcctgtctatgtctacacagtgctccagacaaaggccacgtggtgcaagtggctggggacacttcttaggacacttcttagggatcctagtagagtggctggtatggtggtctgcagctatatggcctggtccttcccacccagagactgcctcctcgtgtaactgagtgctctgatgtggactgcacccacctctgcgtctcatctgcacaccccttcccaaaggcccccagtctggagtgcctcacaggaccggaggatttgcctgtcagccagctcagactgggaacttcccttctgatctccagccaggccctctccagccgagcctctttacgaggggcagtcgcggtgaggaggggcaggtgcctgtgtgatggggcatgtgaagaaatggcagaaaggctgccgccccaggcctcgtccagttgcaggccacatgcccagagcagggcctggccagtattcctagcatggagggttgtaaggtctctggagcccacattgcgctcagtcccctggggaagcaaagccagttgtgtatttccgaggttacgtgcggtcttctcttctcccccatccctcttccctgcctccctcctgccggccttgaggcccctgaggagcagtggagaggccaggtgtcttctctgcccagcgctttctgtgacttctttgagtggctacaggttgagggttgactgtgcgggcgattgcagcgtggccctttcacctctttgcacactgccacatgctgccacaggatggcagtgcaggtctggctctgtttctctgtttggtgccctctatcgatcgtcgtgaggcttgggatgggcctagattgtgagcagcatgggtgccaaggccagggcaggagctggcatggggcctgtgtgggccattgtggtaggaagcctggcagtcgactggcccagaggatcccaggctgctttccttcttgaggctggtggcaggagggctgctgacggaaggctgtttctggtagtgatggtgaaatctggccaaggatgccgtctggaggcaggtagcagcttggctgtgagtggcagctgtcaggcatgtgcaagtctgcgtgggcgaacagaggcaggcaaggacaggctgggcattctgcagctgaagccggagcagccgctgaccagtctggatggttggacccaggcggggccagctgccttcttgcgccgccgttctcactgcatcttccgctctggcccaaagccacatgggagggtctgggagggagagactcggaggaggaggaggagggagtcggggcgatggctctcctcacagcgtggccctcagcagcagaggcaggtcatcttcctgagcgtttgtggcgctcctcttaaagataatgtccgagttttctttacatacctgtagctgtttttacttttctgtttttgaagtcagtttgtgtcttgacgtgtcccttgcaatatccctatcgttatatatgctgtgtgccttatgaaatgctgggatctggaaaatccaaccaaccaacccaccggctcctcaccgtctccacctctgcctttgactgacacctcaatctgtcaatcggaaccgcctaccatgcgattggtcggatggcgtttcggggggcggtgcatgcagagaagccaacagagcagtaagcgcagcagccggagtgtggaagatgacaaggagggtcacctggtgtgccggatcggcgattggctccaagagcgatgtacagccacctttcgtaaaactttacctctctactttctaccccccttgttagacgagacctctcctgcctggaggggcctctagtgcgcgtggtgccttagcggggccaccagtaattgcctgaatgacacagacactagcaacttccatttttaagagtgtagcagtgagagagaaaccttttttgtttttgagaatttgaatgctgtgaacttgcaggagctgccaaccccctgccctccagattctcatgcccaatttcttttctctcctagatgagattgtggggaacctgggtgaaggcacctttggcaaggtggtggagtgcttggaccatgccaggtgagcgagctgcggcagtacagctggctccggatgtgatcttcctgggaagagctggcctgaggttcttgagggtggcagctatcagagcttaacttttttctttttgaagggtggcatcaaagtagggttccgacctgtccatgttggggttttgctgaccccctgtaataagggagaaattcttgggtcctgcagttatgtggcatccctacccaagaattgttggtcagtgaaaggttctgctccaatctcttcacttctccagggctgtggtggtggatatcagaacagggccaaggccccggctcccctgtggcttggagctgcttcctgtgataacttttaggttcttggcttagcaaggggctaggagtaccaataagcccagcccaagcataagtcccattccctgagggtctgcctgagaggctgtgcagatctcagtcgagagaaacatgaccctgggctttctcaccaagcaggctgctgccttcttcagtgtgactagggtagtgtgtggtctccgctgagtgtgcctgggagagtggggtatacctgtgtgtgtcatgctgcacctcactctctcccaagcccaacagtacaatagttttttccccttaccattccacaagactagaacatttgcttcctctcctataggtctgggttggggaggccacctccagggagccagttgccaccctgccataggctctctagttggtttggcacttcagctacaaagtgcttgtgtcctcattggagccacatgccacccatatgtggccctctcgctatttcagagatgaataaacatgctcagggtttgcctgcatcatactccagttaacagcagagctggccaccactgcgctgtagtgctcctacattaaatggggtgttcaggtcattcagacccaggcgtccagcctttcctgtggccacgagatagactgagaggaagtgtccatttgctccaagttcctatgtaaatgcctgtacgactcagcgtggcccaagaggttagggttgggaccagtgggtggagggacatgcacaaccacaccgtggccaggtggagacatggcagactcaacagccgggatgcatgtaggcattctgggctgctcctctctcaggagctggagggaaaatgagcctctggagtcactagggggcaggtggagggtccagggaaactttacgggactcaaagggagccagggccagtgggggttgtcatgcagaggcagaattcagctcagcgaaaggcagggtcttattctaagagcagtgcaactctgacaggggctgccttggaagtgatgagctccctgtgctgaggactggaatgccacggagggaccctgttttaggaggaggccggagtgcatggcctttcccctgaggtcccttcctgccctgagaatctgggaaaataggtagggagaaaaaagcaggggattctctagaaggtccctttatcctgggcctgtgagccttaggcaccacagtcagcctccctgaggcctcagaggacacgcccttccaggctaggactgtctcgttccccactgggcatctgaattctagctgtcctttcctgacagggcctggcagttgagcctcagcaggtttccttctctgctggctccctgcagatggcctcctggggtgaggttgggggtgggaggcacagagcagggactgttaaaaccttctttggacacttaagaagggttcctggcattttgtggtcactgataaacactgtggcaggtaggtgcggctggagaggggtgtggtaaagggagtggccctgggcctcacagtgagaggtacccttgctggtacccctacctcttgccagatctttactcgatcctggaacccccatccctgtttgctcagacttgcagacaagctcaggaaggtcaagaggcgccgcaggagggttctcggtgggacagcctggccagggttggggctgcctggcctataggttaggtcactgtgtgagctcttggactggcactggttaagcaggattggcctctactctcccacactcctttgggagctggcagtggctgagaacataaaagcctaaggatggcaaggatgctaagagcattaactcacagatctcagggagcttgctgttgggtgggcaaaggtctggtgttgcatggggcaggctgggcatccagtatctgctctcttcagtgccggctgctcctggagtggtgtttgttgggagttgctgggttggggtggagggttggggaaggactgggcagctgctgatgagaacctctgtttccttcccgggtaccagagggaagtctcaggttgccctgaagatcatccgcaacgtgggcaagtaccgggaggctgcccggctagaaatcaacgtgctcaaaaaaatcaaggagaaggacaaagaaaacaagttgtgagtatctgcaaggagtgggagggaagccttcagtggggctgctggacccccaggggcttagtagtgtgccttcacccatccgcactgtgccttctccccacactcagaaccaggggagtgtggcaaaggtcttgctggaagcctttagactgcagtccagtcttcaccccagctgtctctgtgtcctgaggaaggcctcccagccctgcgttttgtgaattggggagctcactgggttatgctgggcataaaacaagataaaaacatgaagttggggctctcacatagtaggagatacccaaaggagggcctttctgtggcagacacactgagcactctcctccacgcactgtgctgagcctgggcagatgggtgaatccagcacagaccctcacgaagctcagcagagtgagcaagtggagaaaagcagcaccagtcctgcggagtgcactagcactttccatctctccctcagcaactctgaggcagggctgcttccatatcataagtagggaagctcggagggcttggaccagaaccgtggacatctcccctaccccccgcaggaagcttagtccttgcccagagctcatctgggtattgggtgatggctggtggggagaggtgctcttgctctgatttctcttgcactgtgtgtatctgcattctggtgtgtgacccggtggcctaggagagagttgggaactgtcttcatctgagagagggggtgaggcaggcccccagcacacagcctgagccctgcccatcctcctcctccagcctgtgtgtcttgatgtctgactggttcaacttccacggtcacatgtgcatcgcctttgagctcctgggcaagaacacctttgagttcctgaaggagaataacttccagccttaccccctaccacatgtccggcacatggcctaccagctctgccacgcccttagatgtaagtgtccaccctcaaaagaagcatgggcagccacatgcctgcagccaagtcatctggttacttgttgtccccattcattccagcacgttactaaccattctcctgggcctgagggacaccagatcccctttggcggaaaggcctgtctttgggtgggaatctcagtgtgaggatggaaaggctagggctccctccagggacctcctggaccagcctctctacccccaggcactcaggaagaaaacagaaacgaactgctctggaattggcctaaccaccaaccctgcctccctgcttcatgcatgggataaaaaggtagaagcctgacctgacagatagcaccacaggtcctgcccacatggagaccctcggtctaaccctgacttgtcatctccctgccagcctggaaaagcattatttggcagtgccagggctcagcgcagtaggatttgcaatggttgcagcagtacagaaaggctccttggtgaagttggtaggcgttgagctagaatcgctcaaggtcaccccgcatcgctcccctaccctgagcactgctactgtgataggctgcaggccactggggtgggaagccccacatggatgagaagacaggtgtcttcctcctcccacaggatctgcaagatgggacagggacaaggattccaagcaaggggaacagcttggtgaggcctggagcctgttaacgggctgagaattggctccagtggagtagactgccactggggagtggtgggccacatagttgtgagggtcttgagtgccagatgggatccttgagctgaaaagtgactactagcaagaagccactgtcagaaggggctggaggggaaaggcttgcctgcttatgactagcaatgagaggcggggctgtcttcctgggtatgcgacctgtgcactcagtcgcacaggaccctgtgcttgatttaatgtccttttgccaccaccttaatattcttagtaacttgaacaggggacctgcattttcattttgcaaagggccctgcaaattatgtagctggtgcagggaagagggaaccacctcgaggctgttgctgtagctctgctgagagacaggtgaggaggcctggtctctgcagaggagaggtggagggaggtttttcgaatggcaaatttctttcctacccccctgctaaagtatcagaaccctccaaggcctcaagtacagagaacccttgagagggaggccagcacagaggcaggctgtagtccagctccctgctgaggtgggggtgtgaggacctctggcagttgctggcattggaagaggggtctggcctagagctggcaggagagccagcttctcagtgcctacttccccttctttccctgctaccttagttctgcatgagaatcagctgacccatacagacttgaaaccagagaacatcctgtttgtgaattctgagtttgaaaccctctacaatgagcacaaggtattggtgggggtaagggtgaggccctgtttcaggggtgggttacccgctggtgcagactcctgacctggcaggcctgccttgcctttcagagctgtgaggagaagtcagtgaagaacaccagcatccgagtggctgactttggcagtgccacatttgaccatgagcaccacaccaccattgtggccacccgtcactatcgcccgcctgaggtgatccttggtgagtgactgtatggcctgtgaccttgtcatactggactgttgttgggagggtatgagcagaggcagtggcatgcctgtcattctctgccacccagggcaggcagagtttctcagaccaaggggccagtgtcatgagacacaggtgactgacctggctttatctgtcagccttactgagagagggcctcgtactgggatttgggcaagagtcctgccagccggtgtggtggctgccttgtgacttccaggctggaagcataaggccggatctcacagcctctccccatcttggcttgcagagctgggctgggcacagccctgtgacgtctggagcattggctgcattctctttgagtactaccggggcttcacactcttccaggtacagccaccctgcattggtcccctaccctgagtactgctactgtgataggctgcaggccactggggtgggaagccccacatggatgagaagacaggtgtcttcctcctcccactaatcatcatgtgagattcagaccctttaaggatgtagatgctaaagggaaggcagaggtcagggtagctggaacactcagaggagtcttatgctaggccatcgaggatggaggatggggtaggaggtgacctgaccttctagataaggggcacagatgactaaaggcatcgggatgggctgggacagggcatgttctgggcagggagtgaagagctaaccagagagaaatgtagtcacagcccagtccacctccacccacaagggctgaggagcctaggcacaggctggcaggagaagctggggctgccgcttcattggtaggtttgcatgtcctggggcagtgagggcacttgcccatctttcttgttcctttttctccttgaaggggccagagctagtactgacccccttgcactgtccctaatcttccacagacccacgaaaaccgagagcacctggtgatgatggagaagatcctagggcccatcccatcacacatgatccaccgtaccaggtaaggaccccagtagccccctcagggttggtatagaggcctttctcttcttggctgtgggtcagcagggtactggatgtggtgagtctttgctggacagtccatggttccgcaggctcctaaaagccttccctgtgtgcccctgcagacctgttgccctggttctgctgctgtcttgggagctgctcttccccacctcccaccagaggcttgtccccttactactcccacacttgactccacccccttaattttcaggaagcagaaatatttctacaaagggggcctagtttgggatgagaacagctctgacggccggtatgtgaaggagaactgcaaacctctgaaggtcagtttctggctacccccagctgaactcatgccaaggagagaccccaggcactgggcagacatacagcagagacaggccaggccgctaaaggctgcctccttgatccagctctatgggaggcggcacccaagactgctgggtgctggcaatggggcttcttgcaaactgccccagaggggcccttagccctaccccttccccatagggtggctatgaatgtaattggggaacaccagaagagccagatgtcagaagccctgctgcttcctgtccctctctctcctcgaaattttgggaagaactaggcaggactgaggtgagggggagggaagacctagacatggccaggaagcctctgtcaactgcatttggtgctcggacaagtgaatttcgcagaggtgatctctacccacctgtcaggactttgcatgtgggggcagaggcatcaacccagcaagacacctagtagcctggcaagttccgagcaaaacgttaaacaggcatgaaaggaaaggagctgctcattgtccaggagggcggaagtagagtcctccaaggaggcatcactgcctcctcgatccagtccagcaaggcgtcccagaggcaaggggacctgctgtggcttcccacgaccctgccgtcacactgaggcaccttgtgtccctgagcagagttacatgctccaagactccctggagcacgtgcagctgtttgacctgatgaggaggatgttagaatttgaccctgcccagcgcatcacactggccgaggccctgctgcaccccttctttgctggcctgacccctgaggagcggtccttccacaccagccgcaacccaagcagatgacaggcacaggccaccgcatgaggagatggagggcgggactgggccgcccagccccttgactccagcctcgaccgccaggccccaggccagagccacccaatgaacagtgcaatgtgaaggaaggcaggagcctgcaggggagcagacttggtgcccagctgccagaaagcacagatttgacccaagctatttatatgttataaagttataataaagtgtttcttactgtttgtaacccctggtaccagtgtgtccatctccaggctccttgccttccccttacctgaccttattaataaagtctttcttagcagttcagcttgtggagagctaagtgtgaactgggccaggcacagaagagctaggcaggggtaagaccagaattggggacatcctctgggcccaggctgctgagcagtcctagatggcacctctgccctgctggcttctgtacctctcagccccagagaacctaagggaatcagcccaccgtggctagccaggtggggtctggttttccacagcctgccagtcccattactggccaggactttaggctgtatgtgcccaacaactatggcctgctgagggcaggagacgagtggggcgggttcctaggctgggacagacagcacctcatgacagcctacagagcaagtcacacggcacaggactcagtcagtcattcagctttatttcagtgctggtttttggttccctaagagctgcatgagtgctaggcttcaccacgtgactgggggccccttgggaactgggtactatgggcaggatgcccctgaaaagaactgaagacagaggaatcatacttctctttaatacctctggggaaggcccaggctaaggatgagggcagggaccagtcccagtgccccctggggagagaagagggagaagcttgggcacaaactcccagtggccctgcaaggctatcatccctggatcttgctggagtggacagtcttctgggccagggttgttctagcttgtttctcactgtacctaatcagggggcctaactgcattaacaggcagccagaacctacctaccaaaaagcctgtaacctagactgctcctcagattttggccaagagagggccccggcttgggagctgcttggccctgagagtgagcagaggctcagagaatacacagcacaagggttacagtccctggcctcttcccatcgctggagacaatttaagactgaagggaagatgagaggaggggccagccctctaccctggctcatctgcttctggctatgttcctacaagggaagtgataacagcctgaaacccgtggtaccagggcctaccctatgtccacaatccttggtgagcccttctgtccacccatccacccgctcagccagcctgggcagacacagagcagaagcagcctgaagccctgaagcaggcttaaacacaagtccttgacaggaatccctgccaggattccaggcatagatcctgttctaccagcctccagggcctagagcttggcaccttaggatttgagcatcagtgtgttcctatggttggaacccacaccagctagctcatccagaactagcctcattttgccatctttgagacagggtgctggccccaagcctactcatctagactggacaaatgtaaaaggttcaaagcccagatgatgtaagagctggggtggagctcaagcacgggagcccatctgcctgctctgggatgacagctgcaaaggaccgtttcaggggaagggcagaggggatgaaagagtaggtggggcatgtatgtgcgggcaaagggctggaggagtggtggcctaggacagaagcaccaggaagcctcttctggttcagcaccaggctcccccagggatatccccatctgaggggtctggccccagactaggcaaaggctcaacctgctcagctttgagggtgggggcgggcactgctggcaagatgggcactgtggttctacagtaatataaccttatactacctgtgctgaagacgacagaacaacataaaatcccaatacagtaacaccatcctaatgccgcccccttccctacctctgagtgatggagggaaaaggagggagagatccttggaaaaatcagcataaaacttggatcagctcaggagtaagggtcaaaaccccccaaatcaacttgtggggctaggggaaggcctggtctgtcacagccctggacatgaatggagagtgcaggtctgccctctggtggacagctgccgtgcagctggttctacagaggaagggctgtctgcgtggggaaagcaggggagacacaaagccacaagctctgaaatagagcaggtacaggcccccagacaggacctggcccactcttcaatgtgtgtgcccaggcccagtggctgtaaacctgaaacacagtcttgagagctgcctacggctgtaaacaaaggcccacctggccgtgcagggggctgagggtagagatgcctggagttgctgcacgctcagcctgccacccagcccggaacccagtgggaaagacttccctggctaagagcaagtgacaggtcagttttaagtaagttctgttctctcacagaagaaacaaacccaaaagagaaaaaactttaacaaggtccatgaagcttcatatccttaaggcgtttgttatcaggagcagcaggggacagcagagtcctgcctgcgcaggaaccctctaagcagagtgcagtgggataacaaacttgcagccaaagggcgagtggtagttgatgcccacctcctggaagacctgctggggaatgccaatgtcgcacaaatagatacggcctgcgtgctcccccagtggcagaggcaggcccagtgccagtgaccatttggcatcaatgccctgttcgacttcatgcacaggagggtctatgctgagtactggtgcccggttctggttggcccaggccacagctgccttgtaccagggttgatcgcgcaggaagacgttctcagggcaatccaggcagttgatgaccaggtccacagggctagtgggcagatctgcaggtggaaagagtgccatctgaaagtccctatgagcagagagcagcccaggctgggactagggcccaggtcaccccaagggtgtctttgttttccagacaccactcgaatgcctctccaaaggctggccttcttaaagctgggccagggcacaggccctaggagttgcaagctggctgggctgagtgctagagaccaagtgcatgtcagcccagcagaccactgccctcctggagttctcaggatgaaccattgtcgtcctgagtgtgcagagcttctcagggcacaaagccctcacctcctctgccttctcaggcatgcctctgtatatccaactaatgccctgggcaccttatgacctctgggaaggcagagtccactgtcaaggtggccatcacagggaaaccccactcaggtccagcaaaaacaggagctgactgctatctgctgacccaagaagggtgagcaggtgagagcatgcttattctattaccagctggcctactcattctattctagcaagcnnnnnnnnnnnnnnnnnnnntactcattatctcacaggaatgggtcctccactcagcccaaccttaattaagaattaagagggaacctattactattctcccaggctcctctgctctaaccaggcttctgggacagtattagaaaaggatgtctcaacaagtatgtagatcctgtactggcctaagaagttaaactgagaatagcataaatcagaccaaacttaatggtcgttgagacttgtgtcctggagcagctgggataggaaaacttttgggcagcaagaggaagaactgcctggaagggggcatcatgttaaaaattacaaggggaacccacaccaggcccccttcccagctctcagcctagagtattagcatttctcagctagagactcacaacttccttgcttagaatgtgccaccggggggagtccctgtgggtgatgaggctctcaagagtgagagtggcatcctatcttctgtgtgcccacaggagcctggcccgagacttagcaggtgaagtttctggtccaggctttgcccttgactcactatgtgacctctggtggagtcccttctctgggccatatttgctctctccaattcttctccctgctgttctcatttaaacccattccagtcagactctgtccctaccactccacttaagaccactcatcaagctcaccaggagcctccacagagatgctaaatccagtggtcgattctgtcttcctttgaccttaacctagaacggggcttgctgacacactgaccacatgctcctttcttcacttggctttcagctaccatactctcctggttttcttcctccctcactgaccattcctgtcccatctccttggttaggctctttactccctgacttctaaataaagagctcagttttccaacttctgtatctactctcttcctatgtgacagcatatccaggctcctcatggcttaaatattccctatggcttgtaactctaggctgaatcctttcacttcagattcatataactcgttccctatcaacatttccacctgcatatccaataggtgtctcaagctgagcttctgctgttcctccccaaaccttctctatcaagttttcccatctcagtgatcgcacctcagttactgaggccaaaaactttggagccattgccaactcttctctttctcccaccccccatacatccagtctgtggattctatctccaaaactgatttagaaactaactaccttcaccacctctggcactaccactcttgtcttagccaccataatctctctctcccatgatcacaacagcatcttgacacttctctgtactcctctgtgtagtctactctcaaacagcacccagaatgatcatctggaacctaaatttgattatatcatttctctacttattccttcaatgactgcccatctcaccagagtaaaagcccaaatccttgtggtcatccccaaggcccatcatgacctgaccctgaaatgtccaagtctcctactctccacccagtcctccaacatgcctcctttccctgctttgtttttatccacatcacttactacaactacacaagtatgttacatgtctttttgttcctcctaaccagaatataagctccacagaagaatggatttaaaaaaatctgttgccatatccctagcatcaggaagagtgcctgttcaacgaatatttgtggaatggaccaatgggtccccagctcttcatgtgagtagttggagagggagaagcataaggggatgggaagtagtatattactgttctaagactccttagaggcgaagcaccatccttacacacgtagtgcctttccacctgtcgccactgggtggcatgacgagaccatcaaactgctaaggagggaggaggccttcagcccagccctgcctaagtgctcacctttgaggctagacacttgttggccttgggtcttgctgaagagcgacagctcattggtgatagattccaacatcttgacaaaattgggcaggaaaaggatgacctggacatcatggttggctaggtgccttccacagctgataccctgagcccccttcacatgaggtccacacagtagagccactgtaggcctctggtgaacatttttgggattcaacctggaaaagaaggtgaagaagcagtatcagctacatacttgccaatcccttgcaccctataccagacaattgcctgtagcacctattggtctcagatctcttacccactgctcaccaagtcccaggctccagagggggacaaaatccactgcaggccaggtctatagggtggcactcctgttgtcccaaaccccaacctcacatcattgctgggtcctcccactaagtggttcacccagatcttgctccacacaacactgttgccacaacaccgctttgctgacccatgaacacttaatagttcctctgcagccttgtctgctcttcttccccaacgtgtctgcttcactccagcagggctggtctcatcctctcctgcacttgtaaggctctttcctgcttatgctcaaactacatcccctgcccagaaagcctttcactttccaaactctgaaccgccttttcttggagatccagttcaagacttacctctgctgggattactctggctcatgcctttacctctcctcaactcctaataagctcacagcaagtaccatagctctccattctcctcagtcagttgccaatggttctctttactgagcttagtagcttactgaagttaatgaaagcaatgctgcaggcattaacagtatctatttcataggatgctgtgcagattatcggatgcccagcacttagcagtgcctaacacaaagaaggtaaggtactcagtcagtgctgaccatggcggaggcagcaggccaagggttacctggcctcctaggctagcagctgccttggatgaagttgtcacttccagttttctgctattcaaagctgagactcctctagactcagagaagccacaaataaggagataaagaggattagccccagagctgtgcccaactcataggcagcacagttggctcacggggcagcaatgtagggaggagatggacggcaaggccataggtccctgcctagtggcagagcaatgatagtcacttaccggtttcccaaagggaggaagatgacaagatgttgtcaagctaagaggagcttcataactgcccccattcccaaacacattttggagaatttaacaatctactctatattccagacaccaaaccattcgccttcccatttctgcatttagaggaaatatgatgagaattgctcccttcagaggatgctgcagagttgtggaatctgactcactttgttctctaaaagggttcttcctctcagggagaacctctcccacccccaatcaaaagaagcagagcatggcattcacacacccagcggcaaggtgtagagtatatgggcactggaaatggacctatgtggattagaggcctggctggactgtgtaccagcagtatcatgtgggcaagtccctcagctctctgagccacagtgtgcttatccaaaaacacagggctattatttagctttgaggtgaagttatgaggaccacattaaattatgttgtgaaagcactgtggaacactgcatggcacctgacatacattaaacttcaagattactaaccacgggtctgatttctcaacatcagcaactgctacaaaggacaggagatggacctttggatagttcagacactaagagaaaagactggcacaaggacagccagccccaagaagctggctagagaggagtgtgatttggtaaggacattcagctcctgctccaaaactaatgtttctgggaagccacttaatggtctcaaagtgcccccaacagtggctctgggaggaggtgcaggagacaccagacacacgggcctgatgctctttcagagggcacctcacactaccccctcctgtaggcatttccctggctcttccctggcacaggagagcccaaggatctaacagctaggaagcaggcctaaatcaaagaaaaaggaaaaactaacactccaacccccaactcaaataggatgagggaggtggaaatcttacatctggcttggagtaagcctgcttgaattaagatcacttcagaatcaggagatgccttccatccaaacacattatcaggcccagagaatgaaaataggctggagtgaggagctacaggatttatctgcaatatcagttttctggcaagcactcccaaacaccatggctggaagcacaagccaaggaccaggttccattttgcaaatagggaaggggccctgtgggaagcaacatcctatcatgtgaggctttggatctgtgagtgctgctcagggaaaggaggctttccttgccccagtgaacccagatctgccctgctctttggaagtggcctccccactccagacaccactctcccacaaggttgcctacatcctcctctttaccgaaaaatccaacaggcacttgtcaactctaattttgattgatctctcagcactaccattgccggccgttccttttttcttcaaagactatttccttggttcttacacgctaccctcttggtttcttacctctcctgccttcttcttcatccttctaactgtgccttacatgccgacgttccccagaatcccaccctaggccctttctgttcacaccttctccttatatgatctcatctactcttacaccatctacaagctgacaactcctaaatctctagcatcagctaagacccttttctgaacttcagatcttttttttttttttttttttttttgagatggagtcttgctcttgttgcccaggctggagtgcagtggtgtgatctcagctcactgcaacctcctcctcccagnnnnnnnnnnnnnnnnnnnnnnnnnnnnnnnnnnnnnnnnnnnnnnnnnnnnnnnnnnnnnnnnnnnnnnnnnnnnnnnnnnnnnnnnnnnnnnnnnnnnnnnnnnnnnnnnnnnnnnnnnnnnnnnnnnnnnnnnnnnnnnnnnnnnnnnnnnnnnnnnnnnnnnnnnnnnnnnnnnnnnnnnnnnnnnnnnnnnnnnnnnnnnnnnnnnnnnnnnnnnnnnnnnnnnnnnnnnnnnnnnnnnnnnnnnnnnnnnnnnnnnnnnnnnnnnnnnnnnnnnnnnnnnnnnnnnnnnnnnnnnnnnnnnnnnnnnnnnnnnnnnnnnnnnnnnnnnnnnnnnnnnnnnnnnnnnnnnnnnnnnnnnnnnnnnnnnnnnnnnnnnnnnnnnnnnnnnnnnnnnnnnnnnnnnnnnnnnnnnnnnnnnnnnnnnnnnnnnnnnnnnnnnnnnnnnnnnnnncctctaaaatccattcaattaccttgccctgctgaatttaccttaaaaacaaccaaccaacaacaacaacaacaacaacacccatctgtccacttctctttctaagagacaaaaaaaaaaaaaagagacagacaaagtctcactacgttgcccaggctggcctcgaactcctgggctcaagcagtcctcccactgcagcctctggagtaactgggattataggcatgcctcaccaaacctggtttgtccacttttctgatccctgcttccctagttgggccaccatcacttgggccctggctcagttttctaagttttgcagttttctacctgatctcactgccttcagtcttgcctccattgaattgactgtcctcattgtagctaaaaatcatctttttaaaacacaagactaactatgtcatagctctactgaaatgtcttcagcagctccctaccactcagctgtactgaggccctactttccagccacatagtgacttacggattgccaacaaccatgtgccatggtctctcgattctctctgcccttggcacatgctactccctgtacttagaataccttcttcttggccaggtgcaatggctcacacctgtaatcccagcactttgggaggcagaggcacgcagattacctgaggccaagagtttgggaccagcctggacaacatggcgaaaccctgtctctaccagaaacacaaaaaattagctgtgcatggtggcacatgcctgcagtctcagctacttcatgaggctgaggtgggagaattgctcaagctcaggaggtggaagttgcagtgagctgagattgtgccactgtgctccagcctgggtgacagagtgagaacctgtctcaaaaaaaaaaaaaaaaagaatgccttcttctttcttgcttgcccctgttaatcaccacttgttcgtcagggctcagcttggatgccactgctccagaagggtgactggtttctccagcctggggcaataatatggcttactggagaattttgtttcctctactacagcactatactttctagagacctcattgggctactagaggaaaggcacagtattttattcttcgtgtccccggtgtctagcagaaggtctggcacctggtatcagtctgtctacaaataaaataaggcactgcccttgatatatgagcataaggggcaggtgggaaggtgccaaactccagctcccctactcagttgtcagtgtggttctggaagctctcaggtatggagactgatttgcatcccagccacgtaaagtaaatgatgagtgccaaaggccaggtctccgaaggttcctagaaggaaggcttctgatagttagcaggagtctcaggcccgatggctgctatcaggagagagtcaaaaggcagcttgccagaagaataatgaggacatctaggagatgggtctgaggaggggcaaagaaacctcacagcatccaggaaagtgacttcagagagacactcccatcagatgagcagaaactgcctaatgaactcgtatgtgtgtatgggaggcactgtggtggtggccaggcagagcatccttactccacattgagtccctgccagtttatagacatttacctgttaggtcctccgaggagggtcagtgccatctgactggcacacacacctgtcatctccagtctccgctcaagggtcagcccatgcttctcagccacggacaacagctttttatgcagctcataggaaatacttgggacaaccaggccagagtctgcagttcaaaaggagaagagaaagggaaagtgactacagaaaccaagtccaaaccgggtatactctatccaagattctgcaaatgccaacattttaccatggatcacccctggcccatcctcttcatcttccgggactaaggcacgctctgcagctctgcagagctcaagtagtgactggtgaaccaagtaacaacttgttccaggtcaccacagagtggggacaaacttaagctcccttagcaatttagctttagaccacaaaggccaaatctaccaggatatatttagtgctatcgagaccagcacacagcctgtaacagcaacctatcaggcacatgagaagagaacatgattttcccaaagtgggggaaatgccatcttgggcagcggggcttcctcacaagcaggccccttgtccttcctgagaagtggaacagacactagctaaccctaatggccctctggtccctgctgttctcctcaactgtagggcaggaggacttgttccatctgcttccctcttcctcttccttctctcttctatttaccccttcctttttgattaagaaacttagctagcaaagttgttttctcaaataatttatcattttctccccatctgagttgggtgtaacccagtactcacgaaacagggaagcagtacaagttaagtaagctatggctggctttaaaaaagggtaacttttataaaagttggggagaattagtcactgaaagtacactgtggaaaatacttggtttttcaaggctcaaagccaacatctacagcagctggtgtatgtgaagaagtctatagtattattatatgcaccagtgtcaacataccaggaaagaaacagcaaacccaaaaatttggatctgcaatggacagctcttaccttgacaaccaaggtattgctccctccaagaagccaatgccatcttacaaatgccaaagccactgggctaaccagcagaccctttcccaaagagccccacttggcttcaccggccagtggaccaaccaacgcagattccaatcagcaagccactgtgggactgcacgtcactcactttgtccagctagatcaggtacctttttagatcctgtgtcctcaattatactggactgtcaactgcctgaggtaaggaaattaatcttttacttcttcagccttcgccttctcaacttgttccagctacacttatcaacggagttgagttcttatcaggtcctcagacatataaatgatgcaaacctagtgccatttctggtctggcctaactctaaggtagaagagttagggaataaaagttaataaaagttttcagtacatttatctccttccattgttccagagccttgtctagaaaaatctgttttcttcactggtcctgtcgggagaaatctcttgaggttatctatcaggtccagtcctacctgcatattcctaaagccacagagaatgaggctacagcttcatgttttaacaacaggaaaccaagcacaaagactgaaactataggacccaggtctgtatcctctcagggaaggcagaataacaatgtcatgtaatgatgatgataaaaaaggtctaacgtatcaaataaacactaacactatcctgttggctaactgagcccctctacctgcccaagtcctattcctgggctggggagaggcaacaaacagtgccattaggagcactgagtctctcctcccacctctttctgaaatgtcagtcattggtatctcaggtgccagtgctggaggctgcagactgaccttgcatgtcaacagctgattaaaacagccatttttatggcctgcttcagacacgcacatattatcagaactaattaggctgaacaattttcaaaagtcctaagccacgaacaactcaaacctgtcagacaagtcatgcacctgactacttcaaacaccctctttacctgcagagtcacgcaaggcagagctttcactcgtctatgcatttcttcacctatttatcaggactctttctgttagatttgaaatgggtcagggcagtgagtcttgggcctgctactccacaaatcaagcattctttctaggtctggctcttgtgctacgtgtacaggcaggcagcccctcccctgccccctcattctgagggctctctgggagcaggcagaagcattttctgctagctgtgccctcacagtccttaagagtacaaaacttaatggtacaggagaggagacatcaccccccaccggctggctagatgctgctgctggaagctgtgagtctcttaccacctcctcactgatctttgttgggggaaggggcactgttggtgaatcagcatatttttgcagcctagagaaagacaaagccaagagcctttctgctcagagtctggcagttatggggtctagaactctactctgactgttcctctgaaaggaacgtacaaacaccacaaaatgttccttttaaacatttatacacgtaagtccaacaagttggactggcttatcagaaacagaccaagggaataaaataaattccaaaggaaaggaaccaagaacatagcgtgtaaattgcaaacaacaacactgccactgccaaagcctgaacatgggccaagtctaattatgtttgagttggaaggtagatctttattgttcgggaatcaaggcagtaaaatcagttggtagggtttctttgagcattaatatgtattttacagctgctggtgaaacaagaaagggagagataattataaccagatcgtgacaagcagagaacttcttaggatctgattgaccttagggtatcaaggaagacaacaagtacactcagtacaggccaggaaagaaaactcctccttgcacacctgatttccactgcatgaggctgaggctgtctcttcggaccatgggacgcagtggtccagcagtgcccgtgccggctgcagtctgccccttgtcaggtcatcactttggcactgctcattccagcacacagcatttcaggcctttccctcccttatggacacatatatgcgtccccactccccctgacacagacacccttcagtagtaccatgtccaaggttcctctctccttcagacctgcccagtctttctgttgtgtaacaaagatcccacaacaaagtgttatctcagatctaactcaatcctctcactgattggccctttaattggaaaggctgcatgtgtcccaagtcttatcaataaggagcacagctcatttacaggcatgggatttctccaggactatgacttctgattctcttctgtggcagtcaacaaaactgagtgctgatgtcacactggttcctttagggatataaatccactggtaaatttataccccctgaccagcaatgtacagagtccctggagatctacactaaagctaccacaaactggtagtaatgcaatttagtgtcaagtgttctctgaaggaaggatttgttataagaaacctaactacacattcacgatactctttattatgacccacaagacctgctgtgatctggcctgtctacctcactacctttacctggtacccaacatgtaccccagaccccttggccaccttctggttcctaaattctccaagttccttctggcctcaagagacagttcgcttcacatgctttctccatcccaacactttattctctcttctggggctctattctctcttccaatgctacccctacacagcgggctcctcatctgtcaggtgtcagcacgctgcttacttcccttcattgcattcaatacatctgactccactcttaagtggtagttgaacaatgagaacacatggacacagggaggggaacatcacacaccggggcctgtcagggtgtgggggagggatagcattaggagaaatacctaatgtagatgacgggttgttgggtgcagcaaaccaccatggcacgtgtgtatacctatgtaacaaacctgcacattctgcacatgtatctcagaacttaaagtgtacatatatatatatatatatatataaataaatctgactccccacctcttcccttccccacttacaactagaccagccccatgtccacagtggacctcattccttcatactaaagctccactggaacaagctttgaactttaagaggcaaagaactgctcaacaaaaacctactaattatgaagggaaaaattatctttacgaggaagaaatctggtggtcaacaccttaccaagtggtcaaacagccccagtgatgggacaaggggatacaatgtactccctgatgtgacgtactccctgatgtgacgtactccctgatgtgacgccttgagaaagacacagccctaccaaaatcctagaaaacatgtttaacatgaatcagatcaaaaggaaacaaacaatacatcaaaactaagacattctgcaaatcaattggcctagattcttcactaatatcagtatcacaaaggacaacaaaagttgtaggaactgttctagtttaaaggaaacagaagagatatgacagctgaatgtaatgtgcaatggatgattaaaaatacagctataaaggatattactgggataattgggaagttttgcatacggagtatattagatagtatttttgtaataatttaaattttgctgagagcaatcttgtagtgtggttgtgtagagcaatatatatcacactgaatttatgtgctgtggaagtatttagggatgaaatctaatgatgagtacaactaaatctcaaatggttcagaaatatgtgtgtgtgctcgtatgtattttacataaaacaaatatgtcacaatgttaactggtgaatctaaatgaagggtatatggttgttcattatactattctagcaatttttctgtaagtttgaaatttttttcaataaaaaaagttggggggggggggtgccaggcaggtggctcatgcccggccaaagagtaatcccagcactttgggaagccaagggtgggcagattacttgagctcaggagttcgagatcatcctgggcaacatggtgaaaccctatctctactaaaaatacaaaaaaaaaaaaaaaattagctgtgggtggcagcgcatatctgtggtaccagctactagggaggctgaggtcaggggagcccaggaggcagaggctgcagtgagctgagattgtgccactgcactctatctagcctgggcgatagagagagacctgtctcaaaaaagagttgggaaggaaaaagggaaacaaagttaagtgcttccaaatatgatttaaaaatgtttatagagtaacagtacatcaagcaagtcagtggtgaagtggggaacagccggggaaacagagaaaataaaacgagtagaaatacagagaccgttcccagtctttttgttgttgttgttgttttgttttttttttttttttttgagacagagttcagagtttcactcttgttatccaggctggagtgcaatggtatgatctcggctcactgcaacctccgcctcccgggttcaagtgattctcctgcctcagcctccccagtagctggaattacagacgtgcaccaccacgcccagctaatttttgtattattagtagagacaggatttcaccatattggccaggctgggcttgaactcctgaccccaggtgatccacccgcctcgacctcccaaagtgttgggattacgggcgtgagccactgtgtccggccccccagtcttataatctaactagaaacaaaaaaatacataggtgcaaacttcagaaaataacacaacagccttaaactgtgttatcctgagcacgagtgcaaagtatcaatttcaaatcaggagctacaggtaggagatgtcaggtctcaatttgaactatgccttgaaagacaggcaggactgtagtcacaatgaatagaagagggactccaggtaggagtggagaaccatgaacttctcagaggccagaatgcatgtgacatgtgcagatgaatatgtccctgcctgaagcccagagggtggtatgaaggctcagtgtagagcagtgggcagggccaaggtcagaaggttttaaaagctgagctgttttatgcaggataaagttgacaggggtagaaagtaagaacagaaagaccaaggagaattgatttcaagggacatagggaagctataggatagcataaggaactaaaaggtcatgaaaatttcaaatgaaattttgaaggaaggagagactctggggccagaatgaatactactgaggataaagaaaaatctgttgccaaggctgctacagaacacagtgtctgcatattaaattagaaaaaatgacctccctagtcctttccagacctttttttttttttttttttaagaaaggagtctcgttctgtcgcccaggctggagtgcagtggtgcgatctcggcttactgcaaactccacctcctgggttcaagtgattctcctgcctcagcctcctaagtagctggaactacaggcatgtgccaccacggatagctaatttttatatttttagtagagacagggtttcaacatgttggtcaggctggtctcaaactcctgacctcaagtgatccatctgcctcagcctgattgctaaatttcaagagaatggtatatacatagaaatcaaactcctttctcactctgtctaggcacttgtggctctggaatggcaagagggcacatattagcaaagcagtcacattagcagggaccagtgcatttctggaatgaccaatgggcagtttcataaaaactcaggtgtcaggctttaatgcactaggctccagatcctctagcccttggtttgagcttaaactcttggaaaacatgtaagaagcacaatggttcattactggggtaggagtccagccaagacacctatcttaacagtactgctctaaaacctcatgagatcaccaatgatcataaccaagcccttcaggcctatgacaaccatccacccgattatccaggcccaggaactctgaaggattccaaggtaaagaaagggactgatacattcttccacacctggcactgaaggatctgctagagcctgaggttccccaactcaaccaagtcactggcagggaagtctgcctgctggagacacaaatttagaaactaggctcattagctgtgttcagtgaaaagttgtgacacttcgcagaggagcacaggtttatccagtgcaggtgttctgtccagaacaccacccagaatttatttcctgatgtctcccagaataacatccttgtggcacctgatctaatccatacacataccgttggggaatgaagttggggagggggttatggggagacaaggcaggaccctgcatgggttgggtctatgggtgagaaggcaatgagatgctgaccagctccatggtggtagacacttgattctctcaatgggaagaattatctgcaagagtacaacagctgccaaaggagacctcactacctccaggtaaaattcttcagtggcacttctaaactccaagatttatttcttcctgaattccttttgaacacacatgcaaaaaaatcaaaacagatttcttgactacctatttttgaggagataaaaacactgctggtcttgaaagccttagattacttctagagggactcttggtgacaagaagcagaggaaggcagctacggctcagaggcaggaatggaatgccagctgtgaaagagacaactgctagcctggaattttctgaaagccaaacttgtcctaagagctagatacatccccaccaaggctcaaagacttagccggccagcgtgagaagagtagagtcacaaagccacaggaacaaatcatttgtggcttcaccagctgcctcccttcctagcagaaaccagaactgccttttccaaaagaaatgagtattggtaaaaggtgctggagctcagaccagagcacctcactcaagcttaactggatcctttttaaggaaataaataggaactctagttcgggtcatcctcacacacttcctgttccctaaatctcagcgcacagtgtggaagtggatcatccttcaggcaaagctgcagagatgcctgcaccaagagcaccctactgcctcccatctgggcttttacatacttgaggacagaagagggctgcacagtagaaaacaaatggtggaggttaaagaagtctacccagaaggaaaggctcatgaatagagaatttattacaacagagggaaggaagaattctagtcattttttttaaacgttgagataggatcttgctatgttgcccaggctggtcttgaattcctggcctcaagcaatcccccaacctgtgcctcccgagtagctgggaccacaggcacataccatcacaccctggctaatttttttttttttttttttttttgagacagagtctcactctgtcgcccaggctggagtgcagtggcacaatctcagctcactgcaagctccgcctcccaggttcacgccattctcctgcctcagcctcccaagtagctgggactacaggcacctgccaccacgcccggctaattttttttttgttatttttagtagagacggggtttcaccgtgttagcaccctggctaattttttatttttatttttttgtagagatggggtctcattatgttgcttaggccaggctcaagcgagccagcctcctgcctcagcctcccaaagtggtgggattacaggtgtgagccactgcagccaactacacttctgttattagtatatttacatatttggttcagttatactcagaggcccctaaggtgatgaactatgacttacccagagtatttaaaacagtgtctggcacatagtaggtattctataaatgctgatgctttgaaataatcttactgaggtggcctttgcaaattcacatttgaagtcaaatatttactgaataataattacagattgggtattgtgctagctacttttccacataatctcatttaatccacagtattagcccactttatagataaggaaaccagctta

SEQ ID NO: 1102 - DNA, 2221 bp, Homo sapiens
cgcgcgcaggagggagttggcggaccacgcggggtcggggcgacggagcgggcccagccccacggccaggtcggggccccacctctcggctctgagagcccagccggcccgggccgcgcacctgtcaggtcgggggacctacgtgcgccgcgacacggcgggaggcgggccgggccaggctcgtcccctcggccctcccggaactagtctcctaggccgcggcgcccgccggagcggagagggctggtgccccggagccttcgagtcgggggctagagcggccaggcctccgagccgggtcgagccgaggctggcgacggctgcgtcacgcgagggggcggggctgccacgggcggaggtcgcagccggaagcggaagaggcgctcggagcggggagtggggcctagctgcagccggagcctgggagacgatgcatcactgtaagcgataccgctcccctgaaccagacccgtacctgagctaccgatggaagaggaggaggtcctacagtcgggaacatgaagggagactgcgatacccgtcccgaagggagcctcccccacgaagatctcggtccagaagccatgaccgcctgccctaccagaggaggtaccgggagcgccgtgacagcgatacataccggtgtgaagagcggagcccatcctttggagaggactactatggaccttcacgttctcgtcatcgtcggcgatcgcgggagagggggccataccggacccgcaagcatgcccaccactgccacaaacgccgcaccaggtcttgtagcagcgcctcctcgagaagccaacagagcagtaagcgcagcagccggagtgtggaagatgacaaggagggtcacctggtgtgccggatcggcgattggctccaagagcgatatgagattgtggggaacctgggtgaaggcacctttggcaaggtggtggagtgcttggaccatgccagagggaagtctcaggttgccctgaagatcatccgcaacgtgggcaagtaccgggaggctgcccggctagaaatcaacgtgctcaaaaaaatcaaggagaaggacaaagaaaacaagttcctgtgtgtcttgatgtctgactggttcaacttccacggtcacatgtgcatcgcctttgagctcctgggcaagaacacctttgagttcctgaaggagaataacttccagccttaccccctaccacatgtccggcacatggcctaccagctctgccacgcccttagatttctgcatgagaatcagctgacccatacagacttgaaaccagagaacatcctgtttgtgaattctgagtttgaaaccctctacaatgagcacaagagctgtgaggagaagtcagtgaagaacaccagcatccgagtggctgactttggcagtgccacatttgaccatgagcaccacaccaccattgtggccacccgtcactatcgcccgcctgaggtgatccttgagctgggctgggcacagccctgtgacgtctggagcattggctgcattctctttgagtactaccggggcttcacactcttccagacccacgaaaaccgagagcacctggtgatgatggagaagatcctagggcccatcccatcacacatgatccaccgtaccaggaagcagaaatatttctacaaagggggcctagtttgggatgagaacagctctgacggccggtatgtgaaggagaactgcaaacctctgaagagttacatgctccaagactccctggagcacgtgcagctgtttgacctgatgaggaggatgttagaatttgaccctgcccagcgcatcacactggccgaggccctgctgcaccccttctttgctggcctgacccctgaggagcggtccttccacaccagccgcaacccaagcagatgacaggcacaggccaccgcatgaggagatggagggcgggactgggccgcccagccccttgactccagcctcgaccgccaggccccaggccagagccacccaatgaacagtgcaatgtgaaggaaggcaggagcctgcaggggagcagacttggtgcccagctgccagaaagcacagatttgacccaagctatttatatgttataaagttataataaagtgtttcttactgtttgtaacccctggtaccagtgtgtccatctccaggctccttgccttccccttacctgaccttattaataaagtctttcttagcagttca

SEQ ID NO: 1103 - protein, 482 aa, Homo sapiens
MHHCKRYRSPEPDPYLSYRWKRRRSYSREHEGRLRYPSRREPPPRRSRSRSHDRLPYQRRYRERRDSDYCEERSPSFGEDYYGPSRSRHRRRSRERGPYRTRKHAHHCHKRRTRSCSSASSRSQQSSKRSSRSVEDDKEGHLVCRIGDWLQERYEIVGNLGEGTFGKVVECLDHRKSQVKIIRNVGKYREAARLEINVLKKIKEKDKENKFLCVLMSDWFNFHGHMCIAFELLGKNTFEFLKENNFQPYPLPHVRHMAYQLCHALRFLHENQLTHTDLKPENILFVNSEFETLYNEHKSCEEKSVKNTSIRVADFGSATFDHEHHTTIVATRHYRPPEVILGWAQPCDVWSIGCILFEYYRGFTLFQTHENREHLVMMEKILGPIPSHMIHRTRKQKYFYKGGLVWDENSSDGRYVKENCKPLKSYMLQDSLEHVQLFDLMRRMLEFDPAQRITLAEALLHPFFAGLTPEERSFHTSRNPSR

SEQ ID NO: 1104 - DNA, 1847 bp, Homo sapiens
aggggcactggtacctccaggacctggagtgtactggaagaaatggtgcagtccagatgcatcactgtaagcgataccgctcccctgaaccagacccgtacctgagctaccgatggaagaggaggaggtcctacagtcgggaacatgaagggagactgcgatacccgtcccgaagggagcctcccccacgaagatctcggtccagaagccatgaccgcctgccctaccagaggaggtaccgggagcgccgtgacagcgatacataccggtgtgaagagcggagcccatcctttggagaggactactatggaccttcacgttctcgtcatcgtcggcgatcgcgggagagggggccataccggacccgcaagcatgcccaccactgccacaaacgccgcaccaggtcttgtagcagcgcctcctcgagaagccaacagagcagtaagcgcagcagccggagtgtggaagatgacaaggagggtcacctggtgtgccggatcggcgattggctccaagagcgatatgagattgtggggaacctgggtgaaggcacctttggcaaggtggtggagtgcttggaccatgccagagggaagtctcaggttgccctgaagatcatccgcaacgtgggcaagtaccgggaggctgcccggctagaaatcaacgtgctcaaaaaaatcaaggagaaggacaaagaaaacaagttcctgtgtgtcttgatgtctgactggttcaacttccacggtcacatgtgcatcgcctttgagctcctgggcaagaacacctttgagttcctgaaggagaataacttccagccttaccccctaccacatgtccggcacatggcctaccagctctgccacgcccttagatttctgcatgagaatcagctgacccatacagacttgaaaccagagaacatcctgtttgtgaattctgagtttgaaaccctctacaatgagcacaagagctgtgaggagaagtcagtgaagaacaccagcatccgagtggctgactttggcagtgccacatttgaccatgagcaccacaccaccattgtggccacccgtcactatcgcccgcctgaggtgatccttgagctgggctgggcacagccctgtgacgtctggagcattggctgcattctctttgagtactaccggggcttcacactcttccagacccacgaaaaccgagagcacctggtgatgatggagaagatcctagggcccatcccatcacacatgatccaccgtaccaggaagcagaaatatttctacaaagggggcctagtttgggatgagaacagctctgacggccggtatgtgaaggagaactgcaaacctctgaagagttacatgctccaagactccctggagcacgtgcagctgtttgacctgatgaggaggatgttagaatttgaccctgcccagcgcatcacactggccgaggccctgctgcaccccttctttgctggcctgacccctgaggagcggtccttccacaccagccgcaacccaagcagatgacaggcacaggccaccgcatgaggagatggagggcgggactgggccgcccagccccttgactccagcctcgaccgccaggccccaggccagagccacccaatgaacagtgcaatgtgaaggaaggcaggagcctgcaggggagcagacttggtgcccagctgccagaaagcacagatttgacccaagctatttatatgttataaagttataataaagtgtttcttactgtttgtaacccctggtaccagtgtgtccatctccaggctccttgccttccccttacctgaccttattaataaagtctttcttagcagttca

SEQ ID NO: 1105 - protein, 482 aa, Homo sapiens; identical to SEQ ID NO: 1103

SEQ ID NO: 1106 - DNA, 2124 bp, Homo sapiens
cgcgcgcaggagggagttggcggaccacgcggggtcggggcgacggagcgggcccagccccacggccaggtcggggccccacctctcggctctgagagcccagccggcccgggccgcgcacctgtcaggtcgggggacctacgtgcgccgcgacacggcgggaggcgggccgggccaggctcgtcccctcggccctcccggaactagtctcctaggccgcggcgcccgccggagcggagagggctggtgccccggagccttcgagtcgggggctagagcggccaggcctccgagccgggtcgagccgaggctggcgacggctgcgtcacgcgagggggcggggctgccacgggcggaggtcgcagccggaagcggaagaggcgctcggagcggggagtggggcctagctgcagccggagcctgggagacgatgcatcactgtaagcgataccgctcccctgaaccagacccgtacctgagctaccgatggaagaggaggaggtcctacagtcgggaacatgaagggagactgcgatacccgtcccgaagggagcctcccccacgaagatctcggtccagaagccatgaccgcctgccctaccagaggaggtaccgggagcgccgtgacagcgatacataccggtgtgaagagcggagcccatcctttggagaggactactatggaccttcacgttctcgtcatcgtcggcgatcgcgggagagggggccataccggacccgcaagcatgcccaccactgccacaaacgccgcaccaggtcttgtagcagcgcctcctcgatgagattgtggggaacctgggtgaaggcacctttggcaaggtggtggagtgcttggaccatgccagagggaagtctcaggttgccctgaagatcatccgcaacgtgggcaagtaccgggaggctgcccggctagaaatcaacgtgctcaaaaaaatcaaggagaaggacaaagaaaacaagttcctgtgtgtcttgatgtctgactggttcaacttccacggtcacatgtgcatcgcctttgagctcctgggcaagaacacctttgagttcctgaaggagaataacttccagccttaccccctaccacatgtccggcacatggcctaccagctctgccacgcccttagatttctgcatgagaatcagctgacccatacagacttgaaaccagagaacatcctgtttgtgaattctgagtttgaaaccctctacaatgagcacaagagctgtgaggagaagtcagtgaagaacaccagcatccgagtggctgactttggcagtgccacatttgaccatgagcaccacaccaccattgtggccacccgtcactatcgcccgcctgaggtgatccttgagctgggctgggcacagccctgtgacgtctggagcattggctgcattctctttgagtactaccggggcttcacactcttccagacccacgaaaaccgagagcacctggtgatgatggagaagatcctagggcccatcccatcacacatgatccaccgtaccaggaagcagaaatatttctacaaagggggcctagtttgggatgagaacagctctgacggccggtatgtgaaggagaactgcaaacctctgaagagttacatgctccaagactccctggagcacgtgcagctgtttgacctgatgaggaggatgttagaatttgaccctgcccagcgcatcacactggccgaggccctgctgcaccccttctttgctggcctgacccctgaggagcggtccttccacaccagccgcaacccaagcagatgacaggcacaggccaccgcatgaggagatggagggcgggactgggccgcccagccccttgactccagcctcgaccgccaggccccaggccagagccacccaatgaacagtgcaatgtgaaggaaggcaggagcctgcaggggagcagacttggtgcccagctgccagaaagcacagatttgacccaagctatttatatgttataaagttataataaagtgtttcttactgtttgtaacccctggtaccagtgtgtccatctccaggctccttgccttccccttacctgaccttattaataaagtctttcttagcagttca

SEQ ID NO: 1107 - protein, 267 aa, Homo sapiens
MSDWFNFHGHMCIAFELLGKNTFEFLKENNFQPYPLPHVRHMAYQLCHALRFLHENQLTHTDLKPENILFVNSEFETLYNEHKSCEEKSVKNTSIRVADFGSATFDHEHHTTIVATRHYRPPEVILGWAQPCDVWSIGCILFEYYRGFTLFQTHENREHLVMMEKILGPIPSHMIHRTRKQKYFYKGGLVWDENSSDGRYVKENCKPLKSYMLQDSLEHVQLFDLMRRMLEFDPAQRITLAEALLHPFFAGLTPEERSFHTSRNPSR

SEQ ID NO: 1108 - DNA, 1654 bp, Homo sapiens
aggggcactggtacctccaggacctggagtgtactggaagaaatggtgcagtccagatgcatcactgtaagcgataccgctcccctgaaccagacccgtacctgagctaccgatggaagaggaggaggtcctacagtcgggaacatgaagggagactgcgatacccgtcccgaagggagcctcccccacgaagatctcggtccagaagccatgaccgcctgccctaccagaggaggtaccgggagcgccgtgacagcgatacataccggtgtgaagagcggagcccatcctttggagaggactactatggaccttcacgttctcgtcatcgtcggcgatcgcgggagagggggccataccggacccgcaagcatgcccaccactgccacaaacgccgcaccaggtcttgtagcagcgcctcctcgatgagattgtggggaacctgggtgaaggcacctttggcaaggtggtggagtgcttggaccatgccagagggaagtctcaggttgccctgaagatcatccgcaacgtgggcaagtaccgggaggctgcccggctagaaatcaacgtgctcaaaaaaatcaaggagaaggacaaagaaaacaagttcctgtgtgtcttgatgtctgactggttcaacttccacggtcacatgtgcatcgcctttgagctcctgggcaagaacacctttgagttcctgaaggagaataacttccagccttaccccctaccacatgtccggcacatggcctaccagctctgccacgcccttagatttctgcatgagaatcagctgacccatacagacttgaaaccagagaacatcctgtttgtgaattctgagtttgaaaccctctacaatgagcacaagagctgtgaggagaagtcagtgaagaacaccagcatccgagtggctgactttggcagtgccacatttgaccatgagcaccacaccaccattgtggccacccgtcactatcgcccgcctgaggtgatccttgagctgggctgggcacagccctgtgacgtctggagcattggctgcattctctttgagtactaccggggcttcacactcttccagagacccacgaaaaccgagagcacctggtgatgatggagaagatcctagggcccatcccatcacacatgatccaccgtaccaggaagcagaaatatttctacaaagggggcctagtttgggatgagaacagctctgacggccggtatgtgaaggagaactgcaaacctctgaagaatataagctccacagaagaatggatttaaaaaaatctgttgccatatccctagcatcaggaagagtgcctgttcaacgaatatttgtggaatggaccaatgggtccccagctcttcatgtgcaatggctcacacctgtaatcccagcactttgggaggcagaggcacgcagattacctgaggccaagagtttgggaccagcctggacaacatggcgaaaccctgtctctaccagaaacacaaaaaattagctgtgcatggtggcacatgcctgcagtctcagctacttcatgaggctgaggtgggagaattgctcaagctcaggaggtggaagttgcagtgagctgagattgtgccactgtgctccagcctgggtgacagagtgagaacctgtctc

SEQ ID NO: 1109 - protein, 161 aa, Homo sapiens
MSDWFNFHGHMCIAFELLGKNTFEFLKENNFQPYPLPHVRHMAYQLCHALRFLHENQLTHTDLKPENILFVNSEFETLYNEHKSCEEKSVKNTSIRVADFGSATFDHEHHTTIVATRHYRPPEVILGWAQPCDVWSIGCILFEYYRGFTLFQRPTKTESTW

SEQ ID NO: 1110 - DNA, 1750 bp, Homo sapiens
aggggcactggtacctccaggacctggagtgtactggaagaaatggtgcagtccagatgcatcactgtaagcgataccgctcccctgaaccagacccgtacctgagctaccgatggaagaggaggaggtcctacagtcgggaacatgaagggagactgcgatacccgtcccgaagggagcctcccccacgaagatctcggtccagaagccatgaccgcctgccctaccagaggaggtaccgggagcgccgtgacagcgatacataccggtgtgaagagcggagcccatcctttggagaggactactatggaccttcacgttctcgtcatcgtcggcgatcgcgggagagggggccataccggacccgcaagcatgcccaccactgccacaaacgccgcaccaggtcttgtagcagcgcctcctcgatgagattgtggggaacctgggtgaaggcacctttggcaaggtggtggagtgcttggaccatgccagagggaagtctcaggttgccctgaagatcatccgcaacgtgggcaagtaccgggaggctgcccggctagaaatcaacgtgctcaaaaaaatcaaggagaaggacaaagaaaacaagttcctgtgtgtcttgatgtctgactggttcaacttccacggtcacatgtgcatcgcctttgagctcctgggcaagaacacctttgagttcctgaaggagaataacttccagccttaccccctaccacatgtccggcacatggcctaccagctctgccacgcccttagatttctgcatgagaatcagctgacccatacagacttgaaaccagagaacatcctgtttgtgaattctgagtttgaaaccctctacaatgagcacaagagctgtgaggagaagtcagtgaagaacaccagcatccgagtggctgactttggcagtgccacatttgaccatgagcaccacaccaccattgtggccacccgtcactatcgcccgcctgaggtgatccttgagctgggctgggcacagccctgtgacgtctggagcattggctgcattctctttgagtactaccggggcttcacactcttccagacccacgaaaaccgagagcacctggtgatgatggagaagatcctagggcccatcccatcacacatgatccaccgtaccaggaagcagaaatatttctacaaagggggcctagtttgggatgagaacagctctgacggccggtatgtgaaggagaactgcaaacctctgaagagttacatgctccaagactccctggagcacgtgcagctgtttgacctgatgaggaggatgttagaatttgaccctgcccagcgcatcacactggccgaggccctgctgcaccccttctttgctggcctgacccctgaggagcggtccttccacaccagccgcaacccaagcagatgacaggcacaggccaccgcatgaggagatggagggcgggactgggccgcccagccccttgactccagcctcgaccgccaggccccaggccagagccacccaatgaacagtgcaatgtgaaggaaggcaggagcctgcaggggagcagacttggtgcccagctgccagaaagcacagatttgacccaagctatttatatgttataaagttataataaagtgtttcttactgtttgtaacccctggtaccagtgtgtccatctccaggctccttgccttccccttacctgaccttattaataaagtctttcttagcagttca

SEQ ID NO: 1111 - protein, 267 aa, Homo sapiens; identical to SEQ ID NO: 1107

SEQ ID NO: 1112 - DNA, 1778 bp, Homo sapiens
aggggcactggtacctccaggacctggagtgtactggaagaaatggtgcagtccagatgcatcactgtaagcgataccgctcccctgaaccagacccgtacctgagctaccgatggaagaggaggaggtcctacagtcgggaacatgaagggagactgcgatacccgtcccgaagggagcctcccccacgaagatctcggtccagaagccatgaccgcctgccctaccagaggaggtaccgggagcgccgtgacagcgatacataccggtgtgaagagcggagcccatcctttggagaggactactatggaccttcacgttctcgtcatcgtcggcgatcgcgggagagggggccataccggacccgcaagcatgcccaccactgccacaaacgccgcaccaggtcttgtagcagcgcctcctcgagaagccaacagagcagtaagcgcagcagccggagtgtggaagatgacaaggagggtcacctggtgtgccggatcggcgattggctccaagagcgatggaagtctcaggttgccctgaagatcatccgcaacgtgggcaagtaccgggaggctgcccggctagaaatcaacgtgctcaaaaaaatcaaggagaaggacaaagaaaacaagttcctgtgtgtcttgatgtctgactggttcaacttccacggtcacatgtgcatcgcctttgagctcctgggcaagaacacctttgagttcctgaaggagaataacttccagccttaccccctaccacatgtccggcacatggcctaccagctctgccacgcccttagatttctgcatgagaatcagctgacccatacagacttgaaaccagagaacatcctgtttgtgaattctgagtttgaaaccctctacaatgagcacaagagctgtgaggagaagtcagtgaagaacaccagcatccgagtggctgactttggcagtgccacatttgaccatgagcaccacaccaccattgtggccacccgtcactatcgcccgcctgaggtgatccttgagctgggctgggcacagccctgtgacgtctggagcattggctgcattctctttgagtactaccggggcttcacactcttccagacccacgaaaaccgagagcacctggtgatgatggagaagatcctagggcccatcccatcacacatgatccaccgtaccaggaagcagaaatatttctacaaagggggcctagtttgggatgagaacagctctgacggccggtatgtgaaggagaactgcaaacctctgaagagttacatgctccaagactccctggagcacgtgcagctgtttgacctgatgaggaggatgttagaatttgaccctgcccagcgcatcacactggccgaggccctgctgcaccccttctttgctggcctgacccctgaggagcggtccttccacaccagccgcaacccaagcagatgacaggcacaggccaccgcatgaggagatggagggcgggactgggccgcccagccccttgactccagcctcgaccgccaggccccaggccagagccacccaatgaacagtgcaatgtgaaggaaggcaggagcctgcaggggagcagacttggtgcccagctgccagaaagcacagatttgacccaagctatttatatgttataaagttataataaagtgtttcttactgtttgtaacccctggtaccagtgtgtccatctccaggctccttgccttccccttacctgaccttattaataaagtctttcttagcagttca

SEQ ID NO: 1113 - protein, 461 aa, Homo sapiens
MHHCKRYRSPEPDPYLSYRWKRRRSYSREHEGRLRYPSRREPPPRRSRSRSHDRLPYQRRYRERRDSDYCEERSPSFGEDYYGPSRSRHRRRSRERGPYRTRKHAHHCHKRRTRSCSSASSRSQQSSKRSSRSVEDDKEGHLVCRIGDWLQERWKSQVKIIRNVGKYREAARLEINVLKKIKEKDKENKFLCVLMSDWFNFHGHMCIAFELLGKNTFEFLKENNFQPYPLPHVRHMAYQLCHALRFLHENQLTHTDLKPENILFVNSEFETLYNEHKSCEEKSVKNTSIRVADFGSATFDHEHHTTIVATRHYRPPEVILGWAQPCDVWSIGCILFEYYRGFTLFQTHENREHLVMMEKILGPIPSHMIHRTRKQKYFYKGGLVWDENSSDGRYVKENCKPLKSYMLQDSLEHVQLFDLMRRMLEFDPAQRITLAEALLHPFFAGLTPEERSFHTSRNPSR

SEQ ID NO: 1114 - DNA, 89915 bp, Mus musculus
  misc_feature (1)...(89915): n = A,T,C or G
ggaaatggaggggtggggttaaggttcaagatgctcctggctacatgtatgaatgcagagcatcctgtatgtgggcatatactctactaacttagctatgtccctagccctgaatctttcctacttaaattcatagaaatattaaggaattcttctgaaaatctttctgagatttaacaaattacatttatttacttgtttgtgcgcacgcatgtgtatgtattcgtgtgccatggtgcatgaatggaagttagaagcagcttttaggaatcctctgtctatcatgtgggtctcaggaattgaacttgagtcaccagacttgtcagcaagtgcgggtggggaggtgtggggggaagggacatggagccattttgctgacacactcttgtgaacatttattatttatttatttaagacaggtttttcctctgtgtagccctggctatcctggaactcactttgtagaccaggctggcctcaaactcaaaaatctgcctacctctgtatcctaagtgctgggattaaaggcgtgcgccaccaccgcccggcttcttgtgaactttttttaattttattttttcaagacagagtttctctctgaactactgtcacccagtgaattttgtttctttctttctttttttttaagatttatttattatatgtaagtacactgtagctgtcttcagacactccagaagagggagtcagatctcgttacggatggttgtgagccaccatgtggttgctgggatttgaactccggacctttggaagggcagtcgggtgctcttacccgctgagccatctctccagcccgaattttgtttcttatgcttgttgtgtaagatagtaattgggtgccattgttaatgttgtctttttacatttcaatatggactctagtcatttaataagaccacaaaaatataaggagttggaggttggaattatattggatttatatattactttggagaaaataggcaacttattaaaatttttcatcaacaagcacagagaatgtcttcatttattagttctctaatgtccttcaacagtgtttttaatattatcagttgaagtttgtttattttgtttctgtatcttgtacaattttaaacatatgtatgtggaaaaatatgtatattgagacaggatcctactgtgtagcaccggctaccttggaactcattatatagtccagagatctatctgctggcttctaactcctgagtgctggcattaaaactatgtacaaatagtaggggaaggctcttaatgaggaattatctgaatcaggttggtctgtgaacagatgtgtggggggttgtctttttttttttttttttagatttatttattttattaatgtaagtacactgtagctgtcttcagacactccagaagagggagtcagatcttgttacagatggttgtgagccaccatgtggttgctgggatttgaactcctgaccttcggaagagcagtcgggtactcttacccactgagccatctcaccagcccgtgggggttgtcttgatggttacttcatataagaagacccagtttattgtgagtggcactcagctcaagtaacttattctcacctgtcttagtgtcttattgtctgagagacactatgaccaacagtgaggtggggaggaagggctttacttagcttacattggccacattgtggtccatcattgaaggatttagagcaggaactctaggttttgcaggtacctggaggcagaagctactgtagagcccacttactggctcgtcattcattgcttgctcagcctgccttaaagcacccaagtctaccagcatagaggttgcctggccctctcacatcaatcactaattacaaatactagtttacagtccagtcttgggacattttctgcctatattgaggttccttctctcatgacaatagctgtgtcaagttcacatataactagccagcacagttagcatgagtctataaaaagagaatgaacacagtattaccaggctgtgcactgagtttacggaagcttgcattatactgaactgtcttacagacattttaggcaggggttccaaacaatgtaagaggaaagctgactgatgggcagcaagcctctgctcgtgactgagtatatatgagagctgcttcaattcttgccttgatttccctgtatagccccagctgtcctggaactcaaatccacctgcctctgcctcccaagtgctgggattaagtgcgccgcctggcggactgaatgtttttaagccaaatccccaaggttgctttttattggaatattttccccagtatctgaaatgaatccagaatacctacccttttttgatttaaacgatttataatctgtaggttaagagtgcgtacaacagtgtagtccacagcttggagacattacctacatttgcacagactcacatccaactttttatttgctgagccacttgagaataagttacagaatttgtgccattttctgctgaatactttgttattcatcactttagaaagtataatatttttattaatttgttgagaatttcacaacaatgtatgtatttttttaaattatgggtatgggagttttgcctggataagacagaagatggtggcggatcccccggaagtgatgttacagacacttgtgagcctccatgtggatgctgggagttgaatccgaattccctggaagaggagcacgtgctgttcactgctgatccgtacctggagctccacaacgtatgtttttaaattcttatttatgcgtatgggtgttttgtttgtatgtatgcctttatatggtgtgtattcctagtgtccatagagactggaagagggcctcttcagaccttagacctggacttagagatggttgtgagcccccgtgtaggtgctaggaattgaatccagatcctttggaagaacagctaatgctttaaactgctgagctatttctcaaccccccaaattaatgaatttcctttgaggcaggatctcataatagccctgactagcctggaacttgctatgtaaaccacgctggtcttgaattgttctagtgctggctccaaggggttaaagtggcttatcaccacacctagccatagacaatgtaatgtgatcatatttaccctgccaacttctccccccagctaccctcagatgatatatctcttttaagacaaggaaattctcccatgagacctcattccactgttgacatgcaagatcattggtatttgacatatagtgtgttcactgttatttataaactgtttaatggtacttaaaaactaccttttctttgtagttattacaaatgactatgagcttttgatttcatggtatgaacacagcaacagtggtaacttccttagttataatttgtcattaaaagtttattataagaaagctaaattagggggctggtgagatggctcagtgggtaagagcacccgactgctcttccgaaggtccagagttcaaatcccagcaaccacatggtggctcacaaccatctgtaacaagatctgactccctcttctggtgtgtctgaagatagctacagtgtacttactataataataaataaaatcttaaaaaaaaaaaaaaaaaaaaaaaaaagaaagaaagctaaattactatgtgtaataacttgactttagttctttggtttttgtgtgtgtgattaaatgtatctaaaaattgtaaattttgtctttattttcttctatatagctttcaatcagattacttacttttaaatattcctttgaatttagtattctcgtgactattgtattagatagcttgtaatgacatgaaaataaaacacctttttgtattttaggatgacacacgagttgtgagagtgaaggttatagctggcataggcctggccaagaaagacatcttgggagccaggtaaataacaatgcatgagcttggggtttaaggaaacagtattgcttagtttctttcttgaactttgattaaatgaaaatctgagtgatagtagcaaattttggtacacagtgagatccttacagggtaagtggctgattattttcttggtatctgaatcaatgaatttgcaaaattaaagacagttgtagttatagatttactattgagttctgcccccagaatttgatagcattttaattctctaaatccgttagcagataataaccagcataatctctggttacagtagaaaaaggagctctgagtatcaagtgagcagagcggggcgcactgggttggagctacatgggagagacccagtggtgtggcggggttcccttagaggaattagtcagccagggagaattacaacctgaggcaggggttggtggtctccacagcctgaaaacctggagcaggggttggactctggtggagaaatgagagattggcaggaagcctggcagtggtggggattctggaagagaaagagttggcctctcagctggtgtcagaagatctgagcagagagtgagtgtctaaacaagatagataaacacagaaaaaaacaacccagagtctctgtaactcagcttacaatgtccacggtacagcatgtagtcacctggtctgtaaagagcaagggaagtgggacacactgtcaatcaataaggaatatgtgagcagaatgtgatgggaggcactcacggctagtctggtctacatagtgagttccagggctgcatagcgagactctgtctccacgaaacaaaaactgggtgggaaagaaagaaaaaaagaaagggagaaagaatatatgctcattgtcagtcaaaacattggaaatctcaggaatgaagtagagacataaatagataaataaataataaaataccggggaaactctacaactaaaatataattgaaattcaagttctttggttggccgtgatttctgaatggatacatagaacaaagatgaactgaacatagattaatggggatcatttaccaattagaagatgatgaagaagaaaggtctgtttgaactacatcccagagagataaataatgaaataaaatctttttaaagaataagtgtctaaatttggaaaacgatcaatgaaatatacaactggactggagagttggctcagcaatcctgtattgcttttactgaggtttccctgggaactgcctgtgaccaactccaggggatctggcgccctctcctggcctccacaggcactgcacacatgtacacacaacttaaatctttttaaagaagaaatgttaaagcaggttaaagctcctggtgaagagaaaggaaaagaccatcagaagtgataaatacctggaatctacagatgcttttttttttaattaattaaaagttttatttttgtgtgtgggtgttttgtcttcatgtatatgtttgaacatttgatgtccatagaggtcagaagaggatattagtctcctggaactagagttataattggctgtgatctgccatgtttgtgctgggaatcaaacttgggtcccttgcaagagcagtaaatgctcttaaccttatacagggcccattggaatcatgattcaacaaccttgtcttacggattcatattagataaaagggatgaaaggaatgcttatgggaataacagcataaaggatagggtgtgtgtctgctgtgaccctgcatggaaggatcgtgtggtagaaagcataggcaaagtgaatcattaagggtatgaaatagaaaacataatcatatcaacatttcaacagtaatgtgaagaattttaggttttgtaagagcagaaatttggaggttttttgtttttgtttgtttctttttgacagtttctctggctatcctaaaattacttctgtagactaggctggccttgaactcaggactgcctgtctctgtctctcaagtgctggatttaagggcatgtgccaccaccaccatagctatgcaagcatagttgtactctagagctgtaaaagcagaaattttaaactgaagttcttgaaacaattaaaaagtcagtacaaaacaattctttttaaaggggacaggacaagggaaggaaaacatgagttaatatacttgtatccaatcatgtaataattacaagcacccacattagctggcttacaactgtctgtaaatccagctcacggagatccaacactcttatggctttggcaggcacatgtacacataacacagaggcatacactgtatgcacataaattatgaagcaactctttaaaaaacatacttaaattcaatgatatacctaggttggggaaaatggatgcaaaaatggtatgataaagattaacgtgaatacgagccaggcagtgtggcacatgtctttaatcccagctatcaggaggcagaggcaggtagatctctgactctgtaggccagcctggtctacatatagcattctaggatggttagggctacagaagagtaaccctgtcatgaaaaaaacaaaatcaaaaacaattaaaatctgctaaaataagggaaaggtattttcaaatatttcacaatgataataaaatcaccaggaatgtattaggcagaaatgggtatgtgcctggtaccagaacttgcagatgtatggctcaaaacttgacagaattaaaggaaaaattaaaaattctattttggataaagacaccaatgcctttttcaaaattgttaaaacataatttttgaaaaaatcagatgaggctggagagaaagctctgtcattgagagttcttgctgcctttgcagagccccatgttgatttccaacttccatgtctggtatctggtagctaacagctgcctctgactcctgcaggcaccagcattcatatgcatagcgccccccaacataattaaaaataaaaataaatctttaaataaatgataaaaattgtacagtattaccaatgactttggcttaagaacacatcctaaaggctgcagagcaaacattcttaactgcagaatagatgttcaaatgtatacagtacattgacagtcatgggcctgtgaggattattacctttagctgtctggtaatattaacaatagcttcgtgtctcaacaagcatgtgttcattgttcacagtctgaatgattcagaagcccctgagccttcaccttgatccactgttaatggtctcacgaaggaactcttgtgtatctgtttctaatttggttatgaggtctcaagaggggttgtctgtaaactctagacctgtcctcatgatgctccagagatgtcactgagttttcagaatgcttttgtgggtcttcaccctgtgatagaacctccagtcaccagatgtgcctcaggagatttgcatatcttggccaatgccctgtgacctctggtctgatctgggtccaggttcttcattcccacaaaggagcccatttccaggagagaagatgcattcaggatgtcattcaggtgaacacagggatcacctcaacaaaatcagagatgtccatagctgaatagagaacaatggcctcaccaggcaaggggcagctggggagccccagagtgtgctagcacatgtgggtgagagcatttgggtattgcccatgtgaatttcttctttttaaagatttttttttatgtatatgaatacaacattgctctctacagacacatcagaagagggtattggatgccattacagtggttgtgagcccccatgtggttgccgggatttgaactcaggacctctggaagagcagtcagtcctcttaacccactgagccatctctccagcccctgcctctgcctcctaagtgctgaggttaaatgcatgtgctactgtatccagcaattcttagtttttatttggaggggctgtagctcagtttgcctaggacatactaggttcagtctgtggaccatgaagactggttgtgatgcatgtctgtaatctaagcgtgaggggagaggcaagaaaatcagaaggtcagcatcctgctcagctacagagagtttagggccagcgtgggctactgatgacctgtcagggagagatggagagaaagaagacaaattgagaacggtgtaggaacccagacataagtatttcaaacctttttcagagtagatctgagaacagacagaaagcagacgggatttgaagagctgttgtgggggcgaagtatggctagggggttgctgtgttgtgtgctccttcctgtggaggagtgctgtagtctcagccacactctctcactgctgtgtagtctgtacaacttggagaaaacgacagtagctaaccctgatccacaaaaactgtttggagcagtgtttgatgtggagtaatttctatgtaagttattaccaactttctcttgtaactttaactgagaagggaagaaaaagacatttgctgctttcctagaaggagttaacaggaataaggaatagaggagtttcaaaatgtattgctagatcatgaaaagctaggacaaaggaggtgttgaaatgggctgactgccttccaaggtggatcatgctaggcaagagtgccctgtgtctccaaactgtccttgtccctatttccctggggctgcagagatgagacgagatcttgctacgcttgcagagaacctgagttctgttcctagtacctatttatgttagatggctgtgtaactctagctccaggggacctgataccttctgattgacatacatgggcatctgtacacacacacacacacccacacaccccacacacacacacacacgagtcataaacatgaataaagtaaactaagccttaaaaaaatggaagagcttctacaacatgttttttgtttgttctgagacagggatttaaccatgtagcccttgctggactcagatttcctctgccttcggattgcttggatcaaaacatgcgtcccgctgtgcttggcaagatacaattttttggtttttttgagacagggtttctctgtatagcccaggctgtcctggaactcactttgtagaccaggcaggcctcgaactcagaaatctgcctgcctctgcctcctaagtgctgggattaaaggtttttttgtttttgtttttttcaaatctctttattggttctttgtgagtttcatatcaagtacctgagtactgctcatgtccattccttatgtctgtatgtccgtcccttccccctttcagcctccgcctcgtccccaatcaaaaaaccacgaaagcaaatgacaaaaagcatggaaaacatctcatcgtgaaagctgtggtgtgtcacactgtcccacacatttccacttgtaatgagtcatttgactgttcaggatctctagcttctgtgacaccatcaatattagatcttcatcagcactcttcccagttatcccgttgtagccctgtgtcatggagatcctgcagctggatctgcagaactagccttgtcttgtgtctcagcttgtctcagatggggtgggccaatttcagaacctctggacctgggcctgtgtggtagcagagctagccaacccaccagcttcttctttacctggaccatcagtacaaactctccaggcttgctctggcatggccacccaatgctgccgttggcaggaggcagggctagctctcctgcactcatacccttagctggctcacctgtatctaggcctccagagccagttctgtgctgcccagtcaaggcatggggcccactctcccaagttctacactaaatctttggtcattctacagatgtggtaattaaagtttttaataaagtataaatttctataactgtatacagatccctggtttttagggtacaaagcaatagaaataatagaactgaaaatctgataatttgaacagttggactaaattactattagtaactactaaaacttacttgtttttaacttttaacagtgatccttacgtaagagtgacattgtatgacccgatgagtggaatccttaccagcgtgcagacaaaaactatcaaaaaggttagatttagccagctttcaaagatttttaataaactttgctttttctatgacaagtcattctaaaaaataaattatgctacgtttattgtcttttagtctttgaatccaaaatggaatgaagaaatactgttcagggtaagtattattttattaaaaattttttctttgtaggtaccattatgtagtcatttacaatatcttaaaataacactttgaaatgtgcctagagggtgttttttatgagacagggtttctctgtgtagccctggctgtcttggaactcactctgtagaccaggctggcctcgaactccgagatccgcctgcctctgcctcccaagtgctgggattaaaggagtgcgccaccactgcctggcagaaagcatggttgctgggaattgaactcaggacctctggaagagcagtcagtgctcttagcctctgagctatctctccagcccttacacgcccttcttaactcaccccacctctcatcctgtcctgctattcaagctcccagtagagtgaggggcacacttctgcccttcctgttccctggagggtggaggaaatgcatttccagtctcttggctggatcatttctgcttgtattttccatcttttttattattttcatttacatttcaaatgctatcccaaaagtcctcttatattttccttaaaatggtttttttgtgcctcggtttcccttttttctgtgggcttatactaagccagtattctttttttgtttgtttgtttgtttttgtttttcaagacagggtttctctgtgtagccctggctgtcctggaactcactctgtagaccaggctggcctcgaactcagaaatccgcctgcctctgtctcccgagtcctgggattaaaggcgtgtgccaccacagcccggcctaagccagtgttcttacaaagataccttttcatttcatttctgctttttcaatatgctttccacagctctgatcttgcttacaacccatctcacaacccagctgccaggcctgtctgctctcttacctttgatgcaatgtgcttctgagtcaatatttattttattttattaaaaaaaaagttctttactaaaaagaatgggtgctggagagatgcttcaacgggtaagagcactggctgttcttccaaaggacctgggtttaattcccagcacccagaaggtagctctcagctgtttgttgtcaaccaaactgctggttccaggagatctgacacctcacacagacatacatgcagacagaactccgaagtgcataaaataaaaatcatttaaaaagttgtttgtatgtgaatgcaactgtgtctgtaggcttctgtgaaatcccttggttttagtcagggaaaaggatgctacttgtctgagttgtacattcagtgttgatggtggagaacacagcagggaagaagttgctgaggtaagactcgtgagtctgaggtccagtgcagcaccagcaggtgcttctggcgttcatgttcagaggaaggtctctacttagcatatcagaactagctcttgaaaccagtctgaggttttagagtctagaagaaacacctcagagttagttagtcattccaaggaaagtgaaactaagtttaggtttactctttcagtccgaggctactgtggccgccttgggcagtttctttgcatgttgcttagaattttcccttttttttttttttttttttggcttagaattttctaagatcttccaaggtgctcagttgcttatttaaattatattattacttaacttactgtgtcctgctcagaaatgtgtgcatttttcagcagaccaacttttttttttttttttttttggcacatctgctcttgttttattttgattcaggacagcgtttctctttgtagcacttggaacttgctctgtagaccaggctggccttaaactcagagacctgcccgtctctacccccaacgtgctaggtgtgcagcatcaccacctggctatttatttgtttttgatttatttacttatttttaaatctatattattaactattacatgttatattcattatactttatttacttttgataacatttgcttgttaataaaagtactaacaaagatactatagagaggaatgaactaaaaactaaaatttaccatctctacttcttttgagattatttctttgtttcttgctttttaactgtaagaaaatgtgaacattgactataaaaatatcctcgatgacttcagagtataagacaatctgttctttcaattgattttttttttaggttaacatataagatatattgttccataatgggctactcaaacatttgtcatcattctttgttctcagttatcccttccacagccctttgcagtactcactgcccctcccaggctggctccctttccctcctaccccccatttacttccccacttcctgttctactttctccccacctcctcccccccacctcccactcacagacagggtttctctgtgtagccctggctttcctggaactcactttgtagaccaggctggcctcgaactcagaaatccgcctgccctggctcccaagtgttgggattaaaggcgtgtgccaccactgcctggctccctgttttactttcttagtgcaggatttctatttattgccctctccattccctgccctttttaggatcttttcctttcctgcaggtctaattttgtgatctgaacatgtaaataaatacacacataacaagttttgcatagaagacaaaacatatagtatttgtctttctcagtgactttcacttatacttctagttgcattcatcttcttgcaaacaccatgttttcaatttcctttttttaactttttgttaatttttacctaattataaaaagaaaaataggggctggtgagatggctcagtgagtaagagcacccgactgctcttccgaaggtctggagttcaaatcccagcaaccacatggtggctcacaaccatcctaacgagatctgactccctcttctggagtgtctgaagacagctacagtgtacttacatataaataaataaatcttaaaaaaaaaaaaaaaagaaaaataatatatgaatacatataatctatatacatatacttattgttaatacttagacttctcattaaaatgatttttccttatttgtgaaaaaatatgacttattaaatggcattgacaccaacttctctgtagatgccctcaattccagtgtcaacaattccttttcaaaggcagaagacagaaaaatttagcatttgccaaaccagtcaccagagagggaaaagtagcttgtggtaaataagtcaattttcttttaaaattaaaaaaaagccccaaattattcccattatttcatttttgtgtgtgtgtatgaaataatctgtttttagagaaacttctttgaaataatttgtgccttaacaatgagaccctaccattaaacatagtatacatgagaaattgagtcctccactgtcactttcttatatagatattaaaatatatattacttaaaatatattactgggaaggtagttttaagttgattttcaatagttgtatcaaatgtaaagcattaaaataaataagtaaataaaatcaagtgggctggtaagatggctcagtggttaagagcactgacttgtattcccgaggtcctgagttcaaatcccagcaaccacattgtggctaacaatcatccataatgagatctgacgccctcttctggtgtgtttgaagataactacagggctggagagatggctcagcggttaaacgcactgactgttcttctgaaggtcctgagttcaaatcccagcaaccacatggtggctcacaaccatccgtaacgagatctagcgccctcttctggagtgtctgaagacagctacagtatacttaaatataataagtaaataaattaaaaaaattaagaaaccttaactaagacaggccttaatatttaaaaaaaaaagaagacaactacagtatacttacatataataatataaaaaaaacttaaaaaaataaagtaaccaagactctataaagctactgcttagcctggcgtggtggcgcacgcctttaatcccagcacttgggaggcagaggcaggtggatttctgagttcgaggccagcctggtctacaaagtgatttccaggacagccagggctacacagagaaaccctgtctcgaaaaaccaaaaaaaaaaaaaaaagctaatgcttaaactttaggaaatgtctgcctactgctttgtttactaggtatataggtattgaaacagaggaaaaggtccctggccgtcatgttttgcaaacagtcttttgactgttctataaatagagctgcagagtactcatggccaagtccagcacttagcgcacactgttgtaaagcaacaagaagctttttccttgtcacgtctgggaggaaacagttctgacactgctccttgacagtgaactctaagataagtcgcagaacagtgactggaagaaagcctgctcactataaaccatttacccccagagctccgggagactttgtgcagtggaggagcgcagtatagagcagtcagaatggtaaccgaaggaactggtctatgtaggccaaggcaccctcacctggaaggcatagagtccactgtatgtggaccacatatttttcatccactcaatctgttgatgctgctgtgaatgagagcagtgaatgtgggtgtgctagcatctctgtggggtagtaacttactggatatgtactcagggttaaatttcaaactgaccagcacctgaggtgcctatttaacatatcaaagtagatctggcccagatcatgctgaagaacattcagtgttcttgacctgtgtgtcatctcctgtccagatctggtgaggttttttgttttgttttgttttgttttcttatttttttcaagacagggtttctttgtagcactggctattctggaactcattttgtagaccagggtggcctggaactcagaaatcctcctgcctctgcctcccaagggctgggattaaaggtgtgtgccaccatgctcggcttttgttgagtttttaatttccaacatttctctttctcaaaaatatgaattttctcactagatttctatttcactcacagtgctggattgatttctcatctgttgaaatagatagtgtggtgcgggatggaagtgtgcgggatggatagtgtgatgcgggacgcagctggaagttcttcacccatagtgtacacgtgcatgatgaggatcagggactttaaagatacaaaccatcaaagcttacttaagcagaaataggttgtccaaatagtcccgtcttataaagaaattgaatattgaagttaaaaacatttagccaagaagaatttgatcccagtattcctacttttgaattatgtcatacattctacacaatgttatatgaaaaaataaaaaaggagggatcatgtagcaatttgtttgtaaaaccagaagtactctcttaaaaaaaccaagtgtagactgtgagagaatagaactgaacatcattagtattctagttttgtttctgttcttttttttttttaagatttttatttattattatatgtaagtacactgtagctgtcttcagacacaccagaagagggagtcagatcttgttacggatggttgtgagccaccatgtggttgctgggatttgaactctggaccttcggaagagcagtcgggtgctcttacccactgagccatctcaccagcccgtttctgttctttaaatcagacatttttgtgaaaccacagtatcagaaaatgtcacttaatgtgatttctcctatctctcttggatatcagtactttctaaataggtaggagagaacctaatagatccctgaaaggaaatatctggtgtttggacaatggatttttcttactcctccatttctgtgtgtatgagaacacgtgcacatgtcctgtgtttgcagaccaaaggacaactttgatcattgaaatgtaggtgcttagggtgaggagagaaaggcagggctttagtgtaagtacttacatatgcatgtagactctagtgtaagcctagtgtgatggtgcattactgtatagtagatacaggaggatcacaagttcaaggccagcctctactatatagtgactttgagaccagcctgggctacctatcctttctagaagaatggactgttacggtatacctgtaatgacagctttctaggagctgaagcagaaagatcacttgaatctaggattttgagattagcaggtctaacatagcagaaccccagctcaagcatataggtatgcaaaataagaccattatattttattttattttatttttttaaagatttatttatttattgtatgtaagtacactgtagctgtcttcagacacaccagaagagggcgtcagatctcctatgggatgggttgtgagccaccatgtggttgctggtatttgaactccggacctttggaagagcagtcgggtgctcttacccactgagcctctcaccagcccccgataagaccatttttaaaaaatgtattaattcttgatannnnnnnnnnnnnnnnnnnnccatttgtaatgggatctgatgccctcttctggtgtgtctgaaaagagtgatagcgtactcatataaataatacttaaaaaaaaaagtatcttcaaaaataaaattcctgataggtatagttacatacctgtagccccagtgctagaggcagaaactgctcaatagtcaattagcctattcaaaacgggaagttcccagtcctgtgagagatcctttctcaaaaaataattggttgaataaggcacccaacatgcacttctcacttcaacacatgtggcccaggtgagcactctcgcatacacatgcacacatgcatacaccacagggacatatgcatacaaaatgtcataattcttatctaacggttcataagaaaaaaataagtgctgaactcagtttgatttgctaatcatatattgcccattctttgttttagagaagagaagcttaattctttgattagaatttgctcagagtgtttttgtttcttcaactttgtattttcttctatattttgagcacctaccacaaattcacctatttgaatctagcagtctttgctcttcagtagctctcttgttttgtgcctgtgagtgttctaagcatcagagttttgataagtggttgctattgtttccttagctactttgttttctatgggggaacatctatggtttatttttactttgattgttttgactcatgtgagtgtgtgtgagcctgtgtgagtttgtatgtgccatgcagaggccagaagagggtgttgcatccatggaactggacttacagtcacctctgagttgtcaagtgtgtgctgggaaacggaactcggtcctctggtagagcatcaagtgttctaagtcactggaccactcttcagtgatgatctagtcatatttaagttgtaaaatgaaaaaaactttgcattgcttctgtatataaaatgtattaacattcagagattacattttatagcttttcatttctgttggtattttgtgcactgaaactgcattctgaggtcaataccttcctcaaatcagatacaaagagaaaatcccaaataatggtgtgtgtttgtttatgcatgttcgcagatgtgtgaccatccattccagaggctaggatggcacatgaagcactctcctttgtagaagggcccccttcagtttcacattgtgttccttggctgctgtttgacacagtctaaagtcacttgggaagagagtctcagtgagggcttatctgaattgcacgcctgtggggtattgtcttggttatcagttgatgtaggaagatccagccctctgtgggtggcattatctcctgcgaaggagatcttagattgtgttaagtgtaagtcttcacagttgcatagcacgtactgtagccaggaaaccccatctgaaatatataaatatatatatataatcttcaacctctggtatattaaaaaatggtttcttttatgtttagtaataagtagattttttttttttggtttttgtttttttgtttttcaagacaggggttctctgtataaccctggctgtcctggaactcactctgtagaccaggctggcctcgaactcagaaatctgcctgcctctgcctcccaagttctgggattaaaggcgtgtgccaccacgcccggcccagtaaattttaactattgaaatatttctgcaaaaatgggagacattagctttgaaaaataccacatatcatttcaacaacaaaaagtgttggaataagtgtgactgtgggtaacgtgagtcttgcctattctttgtgcaattgaactgcttacctgggtcagtaagttgctcattttgaagatgtttcttggcatctacaggtgaatggatattcgtgtttttaaagaaagcttgttttcttttatgtaggtccttccacagcgacaccgcattcttttcgaagtgtttgatgaaaatcgtttggtaagttctgtcacactgcatgagtgtgtaggttgcattgatggtgaacttcaggagagtggtggcagttgggtcaggaacctgagatctgagactgatctgagagacttctgagctactaatggggctatggtatttttctttctcctttcctggagttaaccctcccattccattctgttctgaaggacctgtcctgcttgttaagactgtaaagtctctctcaacgcctatgtgacagaaggtggggaagggaagccgtttttcctcgttttccatgccgtgtactctgaatctgcagttgtgtgtactgtgtgtctgctacagtgcaccacctaccgggtgtgtgtgtgtgtgtgtgtgtgtgtgtgtgtgtgtgtgtgtgtgtggtgtgtgtgtgtgtgtgtgtgtgtgtggtgtgtgtgtgtggtgtgtgtgtgtggtgtgtgtgtgtgtgtgtgtgtgtgtgtgtgtgtgtgtgtgtgtgtggtgtgtgtgtgtgtgtgtgtggtgtgtgtgtgtggtgtgtgtgtgtggtgtgtgtgtgtttctgtcagtttcagtccttaggcacatcataacttttgttttgagacagggtcacattggcttggcaccttgccaggaaggcaaagctcgccacctctgagtatcctggaagctgtatgccttcacctcttatctcccagtgctgggaatacagtgtgtatcactgtgcccatctttctgtgtggatattgggcatcagaactcaggccctcatgcttaggaggcagctcctgtggtggcttttcttcaggtttccaggccccgttttactgtccgtctactctcttctacgagcctgtctacactgagggagtgagcatcattcacaaaggctaggacagagccaacctgagtgctttcattggtttggctttggttttagttttaagatagggtctccctacatatcgctggctttcttggaactcactctgtagagtcgacttgctctgaccttggaactcagtctgcaggtcaggctggccatgaacttacagggactctcctatttctgtcttccaagtgctgagattacaggcctgaacctccatgctcagcctggttttctttcatttttataaaatggccattctgcctcttggtttcctgaaaaacatctggaaactgtaattttctctctttagggtctttttttttttttttttctttttcttcgagacagggtttctctgtatagccttggctgtcctggaactcactttgtagatcaggctggcctcgaactcagaattctgcctgcttctgcctctcaagtactgggattaaaggcatgcaccaccaagcctggcctgaatcacttttttgactaacagaaaaactggatttggggttggagaaacggcttagtggttaaaagtgcccgatgggcagctatgaaaaccagattttggatttcattaccaggatagcaaaccaggtatcctaggaatgccatgtaaattccagcaactcccgttcagaggcgaatggatgcaggaggattgctgctgcttgctggtatttagcccaccagagaaaacatgtgacctaggagagagaccctgccttaaaggaggagattggtaggggaacacacatcacagcctctatgtgtgtatctgcatacacatgtatacataaactcacatgattttaatgaaaacttttgaaaaagaatattgttacattgtataactttatttttaagaaatgataattgagtctggcatggaggcacatatttgtaatcctagaactctgtattgagactttcaggcaagctgggtagtcattcgaaggcaaaggcaggcagatctctgtgagttcaaggctacccagtgagttccagggcaaccaaggctgtatagcaaaacctgtctcaaaacaaaacaacaacaaaaacaataacacagagatagatagacacacaccacgcgtgagtgcgcgctcacacccacccaccagcctgttctagagagttgtaggcaagcctgtactagtactaggagaccctgcctcaaaaatagttaaaaacaggaaatgataagttgtactactgactgatgatgctccgttgaaaaatcataataatcaaagcagcgtttttactttaacttcactccctgtgctaatgttcatgctgaagtgactttcttgtttgtttgtttgtttgtttttagagacagggtttctctgaatagccttggctgttctgcaactcactctgtagaccaggctgacctcgaactcagaaatccacctgcctctgcatcccaagtgctgggattaaaggcatgccctgctgaagtaactttcttcttgatccttgggtgtcattcaagttatttaaatttaatccagagggcaagacagctccttttattttccaccacgtgtggttgtttggtccttccttccagtgacttccatgggatgtgattgcttcttcattgtcagcatcggtgttgtcaaacatattgtttcattaacacatttgagaatttatatgtgtgtggttctgtactgagtataatgatcttggaggggcagtgcccttggtattagtgggttaaacactgttagatgataaatgtggcacttccaactttaaagctcataagaaaaggtgttttctttttaatttactctgtgtctgtgtgtctggtctgtgtagcattactcagtgtgtagctttgtgcagtgcccacagaaggtagaaggtattagatcttcctggggcagttgtgagctgcccagcatgggtatgcaagagcatgtgcagtcctagctgccgctccatctctccagcaccaaagcttaaaaatttaagataaatccaaagctgtgtattagtccagatcatacagatcccacagcaaggactctggagttccattagggtctcagctctcatttgtcacattagtggtaaccccagacaaatcagcaaacaggacatggaagtgtgtgcctgtcaccgagtgcttgagaagcagaggcaggaaaactcattttaaggtcattctcagctgtgcaaggagccatgctaccagcctgggcctgtaggagagcctacatccaaaaccaaattaattagttaaactaaaagtaagacaagggctgggaaaacactcagaaaaatatttttcttccccaagacaagatctcactatgtagctttgtctatccttgatctcattatgtagaccatactggccttgaactcacaaatatctttctgtctttgtctcccaattaagtgttgggattaaaggtatttaatgccacacctggctgttaatatttagtttaatttagtttatttattgaggcagggtttcatgtgtctgtcccaggctgagttaaaactccctaggatagctaaggatgaccttaaatatcgatcttcctgcctccatctctccagtgctggggttacatgtatgcctccacatctggtggctttctgcatattagacatcagtctgccaactgagccttgtccccatcttcttgagaataccgatttaaactgttttaacatttaccatggtaccttatttatgctgtgagtatctgctgtgacagtcttcatgtgtcctggaatagagctttctctgaaagtgaatttgagcagccagcaggggtcggaaataacgagagcagtgtgctgagcaccacccacacctcagctcataacaagtttagaaatcatgtcgatgcattggaagtcgtagccactgggctggccagtccacagcagactcccaacactataaacatctatccttgaaaacatatcctagcagacctctttggaaagagaaaggtgaagagcacaagtataattttttacaaaataatttccaggcgtctggaaaatgtttcccgaatcatgtatcattcctgctttttttttcttagctggttttaaggcttgaggtgatggtggcaggggtggtctgggtcctgatgattatgaaatgaaagcaggcaggatttctctactggaggtggagagatggctctttgattaatagtggtatagaggatctgagtttggctgtcagcacccatgtcaagcagaccacaactgcctgtaactcgagtgccagagggctcttattccttgggcatctaggacacggcacctattgcatatgtacaaacacacctgaataattaaaaatattaaaaataagtcttaaaaacaagttacattgcctctttatgaaacacgccttctctcttgagaccttcagctgattggatgaggactgttcacatcttggaaggccatctgcttttactgaaaggccggccactggttttcctcttcttcccgtctttagaaataccttcaacaatgtgtagattggaatttgttcaaacagcctcgtgccctaatatagtagtcagagttgttaattacagctacttaccacagtatgtcggtgttcaaggttcatctgcaatcattagcatcccgagctgctcatatagcatagatgatcactttatcctatgtgtatataaccagtgatccagcagctcagagtgagcagccaagcttcttccaccctggggtcctgtccatttctcttcagactctgggtttcgacaagacagcagaatactcccagatgagggctgccagcacttctcattcctctggcttgaacttggagttgatactggccctggtaactacggtgtgtggctctgcattgcctgaggtctgagcctacaatttgggctattcagcattttgggattttaagtcatgattgtctagccttattcctccagtttctcagttatcaaagcctctcatctatcattgaacctaacaagtaatcattcagaagcagccactgcatggagttaatatctcatgtggccaggctttcctcaaacgctccatacactgacctctgatccccctgtttccacctcccaaatgctgggattgattagaggtgtgttaccccataccatgtttatagggtgctgggtgtgttatccaggaccttgtgaatgtgaggtaagcactttatcaactgagtttcatcttcacctgtgagtcaactttaaaaatcaaagcaaacacacaaacaaatccaagcttggtccttggtccttgctttatgttcagtagaatcagaagaagggaaaaaggggaaaaaaagcctgcttgtgttcctcacactctggaagattaaatcttaccgaaaagctgtttgttgaggagaaaacatgtcagatattcagcattgttttatattaataatcagagctttttctcactaagttttattccaaggcctgtgtacttagccggtactgattgtctgactacaagtgacctattgaatatggcaaacgcctaacttaatccaaaaaaaagttagaagaagaaaccagattaggactttgctcccatacagaagcagcgtaatacacggcagtgtttcctgaagtctgtaaaggcataacgggctaagcaagggtaatgtccatttcagtcgaacaaaacctaacagattccagtctgttatggttaactggttaaaaatactgttagaaaattggaattcaaaacagatctgacttaagcagttttcttttttaaacaaagtatatgtttgacacatttgcttttacttaggaaaaaaacccttaagttagaaaaaatacagcttgggtgtagtgccatgtagtgtaaataactcaactattttgctatgaatgggccagtatatacttattgctggagttcttgctataaaattcaggtaaggggtttaaatataccctagagtattatttaaaaataaatttgcttctttcaaatagaataccaaccttggtctgtgacatttgggagagaaattaaaatattaagcctttattgccgagtaagctgaaaatacagtaaaggttatgtaaacataaatcagaaatatatatctatatatacagagaatcaccacctctgaaggacaagccgtctactgttctctgctgtgagagttttatcagtactcgtaattctacctcagaggccatgctagtgggcaaagatgtaaacaagggcctgccttgtttatattatgaaatatgtggcctggtttgtatgtcttgtctttataggtgtctaacagctgcctgggttgttttaaagcaccagtagggcccgcagaggactctccgagaacaggattgccattgagatatgtttatttgatgtgttaaatcctttttaggcttctttacttaccacaacactctctttaagtgaatgaattgcacacagtggaataaaatatccaatgtgttcagactatattggggtgtagcttttctgtctaatctgcatatgtttttaatggaatgtttacccaggctatttcttggcaggattttaatagtcaaaatataaatggcatcatttaaagactgtactacttggctgcattaaacgttaaaattacaggacaaaatggttggtgacagcttctcctcagcctttttttaaaaatttccccttgaggaggttatttggtgtttacaacaatgttactgggctcgttttgtagttcagtttgtcaactttcactttcataattgtgttttgctaaaatatttaccttgttcaatttgacggttaggctttatgcccctcaccccacgtttttgtatttccaagttattcagctgttttcatttactcattcctgaaaaaatattacagtccgcgtagtccctgcattaaacctgactaaatctctcagtatggccatattttgaaattcaatctttaatttgatactcaatcacacaggttttatttgtacccatttcctgtaatcctatagcattcagtgaaaatattagcggtgaggatcaccgggggaagttgtaggcactgagatttcgggagttaaatgttcgttttgtagggctggggtgaaaaactaggtttcccagttgaaattgaagaagcttgttgttcttgcgttactcattcatgcaaattggcgaaggtataattgaaacaaggttggctgtgtttgagtcagggctgcagctgagctcagcttaaaggtcgctggaaatcaagtgctttgtcagtgaaggcgttctgactcccggcgattctagacacttggggaacgtcaatctcgggcatgggtcgtccttttctatgaaatctggtatctgaagttaaagacgcctccccacgagctttttcaacaccgccgatggttttttcctctggatgcagcacagctgcgctagcctgactacagacagagctctttgttttgactctcagccctgaacatgcttggaaatgagaacaaatggcacagagtttacgactgcactttgccgccagaagaagcaagacttaccctctgtcggaaccctctggagatgacttggatagccacgttgacacacacggccagaggcggccccggatctcagtggctagtgtggttcaaatgaggctgacccccagacaggcgccacaggctccgtgggtagagcatagatcctctgaaagtactgacaaaaagagcagctgcctgcagatctcactgcagcccagatacggagggtgtcttccatctgacactgtcgtggctgatagggacagtacttcctctacctgtgcttcaaaggatgatgtttgcagcagcagtggaattgacagtgagctggacaatggcagcctcagtaacttctcagccagtgacagtgggtcttacagcagcagtggcagtgactgtgggtcttgtgcaagcctcgcaagtggaggctcctccaccggcagtggtgtcagcgacagtagtggctatgagacctttttcagtggaaatttaccttctgacaacgcctccaacagaagcgtgccagtcgacactacaccccgtgaagttatgtgcggaagtcccagtagacttccctttgcccaggaggacctggatcgtggagtagagattatgaaactgccagtgagtaggaacgcaaagggtccactgaagcgctgcacgtctttggtcattttccccaggagtccttcaaacaccccaccagcatccccgacgagcagaggtgcctaccagacctcacaccagttggttgtatcacctactgaaactgcacatcatgaagatggatctggcaccaaaggctttctgtcaacagctgtcaacgggcttcgattatctaaaatggtttgtactcctggagaagtcagagatgtacggccactccatgccaagggctcattgcaaaagaaaattgtcatttcaaataataggcccaaacaaactgtgtgtgagaagttgccagaaggattttcctgtgtttccgtgcacttgacccaacaaaaaccaacgacatcagattgtgcaaacccccgtggtggctgcacatcagagaggttagaacttcagctgcagtctgatttggaccatggcatgctcaaacagagggcatccccttgcttgccaaccgcatcagacatgggttaccatttaaacatccgtggagagttggaaagaccaaattcaccgataagcaaaggccatgctgctttgcaaagaagtgtttcgctgggtgggacatacccaaatatttcctgcttatccagcctgaagcacaattgttcaaaggggggaccatctcagttgctcattaagtttgcatctgggaatgatggtaaagttgatagtttctggagacagagagacttgacaaatgaactgtctgatgtttgtaaggtaagatttctctggtcttgaaaaaatacttcctggaattcttagctatactgattatacttgattatagcactatctgttcctttctgtggcccttagtgaggaagtttttagaaagcttcaattttatatttgtaaagctctttcttattttaccaatggataaactacttttaaaacaaacaaacaaaaaaaaaaccaaaaaaacctttccttggtgatttaaatcctaaaattcttccagaactggctcgatgtcataacactcgatcttgggatatttgttcttcttaccttcagaaatgggattttcttctccctcttaaaacacatgtatttgtaagatcgctgatcaaaaagactattatattgaatgtttcaagcagaggaaaagtaagtgggctttgcatttacatacaccctagccacaggaatgctgtttgcaccctatttttcctgagttcccagtgatcgctgtctcccaaaatgtaactcactttttcagcagtattgatttctaagttttatgtgtttgaattggcttaaacgtactaggtagtttctataattttcaatttactacactagtttattgttctcacaatgttgctttattttattagtaatttagctctaacagatcttagccagattggcattttatgtaatttggccttttcaaattatttacaatctttaaaactaaagtagcctttaccatgtctgtatttggaaggttttgcaaaattccaggaaatttaattgtttttctgacgacattagctctagattgacaacacatatgctggctggcgtgctctatttctttcttgtgaagggaccttgcttcttttcatggcaatgcctgtattaaatgttggaggagtgtggggggaatccagataatgtctagacagatggagttagaaaattaggtaattgggctcttttttctctcttttgaaatctggaaaatataatcattgtgtccacccaaggttaatctacgcagctacttcactggggataagagaagattagatttcaaagtttgatctttgttttagagttattcattccacttgcaaaatttttctaaaacagtttttggaacattataatcggtttaattctcttccccaaagtgctgggtccttaaagcagcattagtactctgccaattcagtcgatgttactcacagagtctacattcaaagaaacctaagaagttatgaatctgaaaagaattctagaaatagtccagagacagtcgttactgtggcagcactatcatttgccactgatgctttccaaagaggtactttaaatacacccagtgaagtatataaactcaatgctgtttgcatcgctaagaatgttttcacaggcctttaaattttctagcaaactaacaattactgctttgtaacaacctaatcctagtctcttagttgtaaaaaaatacagaaggtgctatttgtctgagaactttaaattgttcttcaacatgtattaaacataaaaatagtataagtgacataagttatatttactgtctactgtgtctaaattaattcacttagaaatgacaaattgagtgcttatgctaattccttttctaaacacggagtggccacagtaatgacatttcagaagtaatggcatgtttatcaataatatattaatctaattatagtggtttattgtaactagcttataaataaacagctcccaaaatatttcccatgtctccagttagtctgggttcgtgttcagatgtgctgagactgcatccacatttaacaagttgatactggagtcgcccttggtaatgtcagccatctgtactgagtagcagtgaaatcagataacagctttggtcagagaccctggtgaggcagagaggtctcaagtctcttctcttgtatttggctatgagctcacagcagcctcttctcgagtttacagctctcttataatcctagcttgtaaatgactaatgtttaatgtgtagttaggactttttacctgtatctaagacataggctatcctctgtgcttacagctgagactgaaaaatggtttcctaaaacctgcctcagtgtctatttcaggtgcagcaaaaaacaacctttgggggatttttttgtggttgggtctctttttgctttgttttgtgcatttcaaatgcaatactgtgtaggtaaaaatatatggtggcctttgatctgccaggagaagttttgtgtttctttggtcagtatggtagtttgtcagtttaaggagccaaggtgacatacacagttctgaaaatgaatactgaactttctaaagtctgtagttcgcttgtttattattagttcacttttccctgtgtcgtatgttctaaatctcattgttggtgctgagaccttccattgccttgtttagaatccttccagctccaccctggcttggatgtgctttccttccatcatccagaaatgctgtgctttttgttatgaaagggtttcctgctcctcgtctagtacttaaccctagataagcatattgcttagtcctaaaggaatagatcctgaaatagttttgtctttttttttaaagatttatttatttatttatttatttatttatttattatatgtaagtacactgtagctgtcttcagacacaccagaagagggagtcagatctcattacggatggttgtgagccatcatgtggttgttgggatttgaatccaggaccttcagaagagcagtcagtgctcttaaccgctgagccatctctccagccctagttttgtcttaattataatgttcaccattaatctccagatgatacaattcagtaattttaaaataattctttctgatatcaaaagcccagatgggtatttcagggcaggaattctccaacactgtttatatttggagccaggtaaatttttttgtgggtggggctgttttttgcactctagggtgtcaagcagggagcagcctgaccatccgacactagatgccacttgcacaccccaaagtgtaccagtcaaaaatggctccaggcattgccacgtgtcctcttgggcaagttgcctcctggtaagaattgctactttaggcagaagtcttggtgtttgaaggccagaaatgtgcaagagccttaggttgtaagtcactcagtgtgactcacgggagaggtgcagaaggcctgggggagccggggggcatgatgcttaggttggagctaaagtaggcctgcaaagaagtcctttatgtcctgttaacagaccacacttagtaaatagacatctttatgttttttaaataagtgtgggggtatctgtgtgtctcagtgtctgtgggtttgcctgcctgcctgcatgtctgtggtaggtatgtatatgtgagtttaggtgtcctgagactagatatctcgaatcctcaggagctggacttgtaggctgttgcgagctttctgctttctgtgttctggggaatccaacccagaccttctataagagcggtacatacatagtcttaactactgagctaccattccagccccatcacttttgtgctttaagataattatttgtggcaccaggaatttaagctactctaacttttcttaccttgtgtgattggataaacactgatgccctgaagtaagggagtacaggaggtaagaccagcctgagcctgagtggtgcagcaggtacagtgaggtcctggtagtgctgctggaggaatgggagctgagcccatagaggagctcggaatctccaccaatagggaggactgtgctcaaaggatcatctcagctgggccatgcatcacatgaaacacagtggggaccactaattatgaggacagggtaaaagaagataaaagggagacccagtgagctcctagactggccaggagaggttgatgacatgcaggcagggaagggccagcagaaagcatatgcctctacagagaacttcattctccattgcatgcagtagttaggagctcattggtgactccagcaaaagtaagctaggaaaatcccagggttagagcccaaggtgaaatgataacatagctgagaacagcaagcatagatgccatcctacaatgagtgcagtgtagaatagtcaggtacggtttaatgattgttacaaataagactcagcattttgtgatttaagatggaataagacaaactacatccctacaaagaaagtgctgtcttccccaggaatgggaggacagggctctccgctcttcaccttggcaccttagataggaaagtatgggtggtaaaacccagactggattctgtcagtgttatgtgagggaacagaaaactgtatatgggaactcaggactgcaatgcatagccacaattcctctttaagaatatcatattttattaagagaatttcatgctttgaccattatcacccctttgtctcaataactccttccagatctacttttacaacctcttccccctcccacctttgtatcccccctccctttttttttatagcccactgattccatgggtgtggccatccaccggagtatgtgaacaacattgctttgcttttctcagcctctcatctgacaccaaaaataacatagagctgacaagatagctcagcaggtaaaggcacttgctgttgaccttagtttaatccctggacccgcatggtagaatgagagaattaactcccacaagtgtgctctcaattccacatatgcactctgacatactcctgtgtgtccatatgcaaattgataactataataaaacatttagagaaaataaaaccaagtagagcctctatgtagaattgagccaaggtttttaaggttatggcctaaaaactttgggatagggagcctgcccgagctagctgttgtaaactttactgcactgtgatggctgacaagacaagattagacctgggcttgggagcttggccaagcaggaggcttggcagcattgctgggtgtggccaggccacgtgctgaggttgagagcaagattaagggaagggaaggctggggggtggtgaagcagttatctgtcagcatatcttcggagtgtccaaagccttgctggtatcttcttcaggcttttcttgtgggaaggttgtgacaggtgcttcaagatcaaagaaaaatgtttgaaaacagcctaggagctgtctagtctgtgatctgatctgggggctgtcaacatggaagtggttgctgaaagcagcctcagctttgttaagatttaaaaggcttctgggatataatcccacctagcagcaggtctgagtgtggaaagagaagcatttggcatggcactgagtcctgtagctcagctcaccagctataggaaacacctctcaggaggcagctcacacatttttagataggttcttagacgcctatgggagatagtacagagccatgagccatggtgctttctagaataaatacgttgccaaacaaagaatttgcattaagaatattaatggtgaatgaaaatgaggacatgagcattcccgagcatggttgaggatagggttgtattgttggcctgagggagagcatgcctagagacagccacagggtccagaataaactaggtcatgaaaacagtggggagagaaagagaatggaggatgaaagcagaccaagaaaggatctgcctgcatttgtctgagtatgggaataactgagttccagaaaagccagggctgtgtagagagacctttactcaaaacaacaaaacaaaacagggtttctcagtgcttagcttctctaatgtaccaggatgggatgagtctgatgtttctgtcaacacttagcactgtctacattcacgctcaagaatttagaaagtggacagctggaattcatgattgaataaaacagtttcacagaagagagaaaataggaatttaaagaatgggtgtattactactcagatcttctagacacaagtcagtgctgactggaggggtgagatttgaaaagataagcaaccttcgtaactggttggaattgatggctttttgtgtgtggcaatttagattagtttcctgatactgtgtaagttgaccaacactcagcttatattcagatatttagaccctgagtatccagtgaaagtcgatacacagcagagaggctgcatttgtgtttggtttgttgtcaatcttaatgacaataatgctatccagactttacaaccttaaatggttaagtatgttcttatcatatggtggcatttcatttgaattgaatttgctcatggaaatagttgggcactaaccaaaatctgccattcggaaacacttgtggtattttatttttttcatttatttgtttttacttgatatatgtgagtgatttgctgccatgcatgttaagtgtaccatgttcatgtctgatgtctgctaaaccctctctctagccccattgtgagttcctttaagaatggttcttatgttacattttcccttttcaacacgaggactgttggcacgttctgttttctttaactcttctggcttatttaagcaatgtttacatcctcgaagcattcttcaggtgtggcagtcaagatagtactgagactggttaactcttttttttgttttttttttgtttttgtttgttttttgttttattgagacagggtttctctatatagccctttctgtcctggaactcgctttgtagaccaggctggcggctggcctcaagctcagaaatccgcctgcctccgccttccgagtggagtgctgggatcaaaggcgtgcgccaccacgcccagctgagactgtttaactcttaaactgcactatgtaatcactgagacattgtatactctatgtgcacagttgtggcttttccttttgctactttaaaggagaaagttgaaaaatcactttttttttgtttttgttttttgagacaggttttctttgtatagccctggctgttctggaactcactctgtaggccaggaactcagaaatctgcctgcctctgtctctcaagtgctgggattaaaggcatgcgccaccactgcccagcgaaaaatcattttttatactttcatagtgttaaaataatatattacttttcaactctaaatcaacgttaaaaattcttagaaattgctctttctttagagcagcttacatgactttatccagggctgctaggagttgggttcccagcacccacatctggcagctcacagctggtagttcacattgaaagtgttgattactgaataaagtcatggcccctttgggatgaggtggagaggatcttgctggctaaggctgagctgacagcctggcagggacagaaaaccaatctaggctatttaagtgatgactggacggttctcctaaatgaatatcgtgtccctgggctgagtgccaatggaatattgtgatcctgagtcaaggattagtttccacagtagactctgattcatagcctgcacattccactcactggtaacctagaacttggtgtctgcataaaagccccagatcaagttttctgcaaggaaaattgaatggagaaagacttgaaaggacatttcagcaaaggccatcaggctgcctcacagttatcattgttcgagttcctccaagcctgaagctgggatcctctgagtaggtgctagtttcaaatgactattttagctaagaatgaccttcgccctcttacggggtcatagaccttaatggacactcaagtcatcttcaaagcaaatgcgtttgactaaagtatttaccagaaactgaacaccttgtattattgcccaatttttagacacagtgatggacacaggaaaatgttttctctctatgcaatatataactgtattaacttagggtaaaacgtattttaaaaagtaatatttacttaacctgattctcaaggtgcttgtgggaattaatttgcaatacataaaattacctgaccttcacatttattgtctgatttacctaggtatattctggaagtatatctagtcctcgtgactaattcaaatatgtctcataatattaaaatattatttttttaacacacactgtgaccttttgcattcttgacaatatgctaagtataagcatgcattcctgccacttacagccatagaaccatttattagaaattggtcagagccgggccatggtggcgcacacctttaatcccagcactcaggatgcagaggcagaaggatctctttgagtttgaggccagcctgtgtctatagagagaattccaaaatacacaaagaaaccttgtcttggacaaaaccaaccaaacggatgaatgtaatagaacaagatggttcaatcagtaaagtgcttgttgaataagcatgaggacggacctgagttcaagtcccacctcacatagattaaagtgggcatggtagcatatgatgggaagcagagataggcaggtcgctagggcttgcaggtcagttagcctactcaaatgatgacgcaagattctggtgggagacactgtctggggaaaaacaaagaaagatgggtgatggctggggaatgaatgaatttgagagtgtcctgtggtttccatatatatatgcacacatatacattcccttcagagtaagactaggaaaggtaccacgatggcttcctgctagggtttggtttgggatgcttaccatcattatgtcaaaaagactcagctagaatttttaatcttgaaggagaacttgccatattgttccacagagagttaattggtgcttgtatttcatattctgtgttttagaaacttgccaaacagttaatacttctgcatgggaaatgaagggttaaataaatgttcacatgcctgacttgggccccacagactgaagcgtagtgcctccatggtctaatagtgttcctgctctaccacaggcaaacagcactttacccctgcagtaggagaacccaactggggcaagctgcttagaaaaggttattttggtaaaaatcacaccagaaggaaaaaacaagtgtctggaggaaaaattccatcgtgatgactccgacctgatgaataatgtcccagctgggtagcgtgtggcgcaggtcaagtccatccttcctgcagttgttgagtgacaggaaaggctggagatgtcagctactgttcccggataattaacttcccttttacctgtttggttgttttccccatcttgtggccaaaggagtgaaatagttcattttgttgattactttctgtttttcatgtgtgtggatgggcatgtgcttgtggacgctcaggttaatgttgggaatcatttcagtggctcccccatgctacttctgagatagggtctctcaatccagcctggagcttgctgggagttttgctcccagctcgtttgaaggagccctacttcttcccaacattgaaattctaggtggacagccagggcagcttggcttttctgtaggttcctgagcctgaaactctgggcttcacacttgctctgatgaaccttactgcctttactgcagccagccagctccatcacttacaacctcgtctgttaattccaggctcatgctcctcagggtctcatgagaactgctattcctgtttccaccaatattataataaacccttttaatatgtacattttcagaatacacaagaaagtataagaaataacatggtgaatggatgtttcaccttcaagtattgtcagcactttcaatcattttgcccatcttctgtcttcatttttttacttactaattttgtcttattacttccctacatcattcttcaaggattatgcatgtcactgcttgtcccaacagttaaattttgctttttaatatattttgctgtaaaatacttcaatatgtcagcctacataaaaaaccaaaagatattttattttttaagatttatttattatttttatatgtatggttatttagttgtgcatgtgcaacatttgggacatgtatacatgagtatgtgtgtgtatgagagtgtgtgtgtgtgtgtgtgtgtctgtctgtctgtctgtctgtctgtctgtgctattctgtttttctagtccgtgagacagggtttccctgtgtagcagccatggctgtctaggaacttctctctgtagaccaaggaagcttaaatctcttctctaaaactcagagatctgcctgcctctgcctcccaagtgctgggattaaaggcatccaccaatactgcccagtttttatttaaaacttgcatgttacaaatgaagaaaggaatagaaactagattgacacaagattggcaggacatagtcctgatctaagccttcagaagtccagtctggggtacacagagaacttaccaaattaatatagtatcgtatcattgataacccttaaatgaacagcactgtgtagtccacttgtgttcactgctctttaatacaggtctgcaggtcactagattatggatttcaagtttgttgacttgtaaactggcaatgaagatagagttaacctcagttaaataatgaggtcatactatgtgcagtgtggtgtggcttacaaattgttttttgtttgtactttttgcacataccgtattcatgagagtgctcctgacgtcatggtgcttgtgcacatggccacaggttgatattgaatgttttcctctactcccctcactgaacctggaggtcacccattggaccagactgaatggccattgagttccagggacccttcctgtcctctgctcatagtgctagacaataggttcagagtcccatagccagctttcttttttttttttcagctgtattattttttatgtgtatgggtgttttgcttgcatatctgtgtacactgcctacggagcctggaagttggtgtcatatcccctggttctggagttacaggcattagttgtgagctaccatatgggttctgagaaccaaatccatgtcaccaagtactcgtattgctgtgctgtctaccccaacacaactaatctttatgtccgctctggggatgcaaatgcagatctccatgcttgcatagcaaacactctcaacccagtcatcttacaagcccaaggaattagttttaacctttattttaaatatttagtattcttagttgaagaaagtgtaaaatgttttatcttgagttctaaattttacctgtcaatgatgtttttttttgttgttgttatttttgtttttgagatcagtgttataatttcagtgaagttgatgcttgctgtattataggtcaacttcatgacctgttaatatagcctgttaatctgtccgactttaccaacaatatgcagattccctgtggctgtttccatctgttaaagatggagctgaggggctggagatatgaatcagaggttaagagcactggctgctcttccgaaggtcctgagtttaattcccagcaaccacatggtggctcataaccatctgtaatggaatctgatgccttcttctggcctgcagtcacatatgcagccagaatgctatatacataataaataaataaatctttaaaaaaaaaaaagatgggtgaggctcgtggcactagggaacagggacagacaggcatgtctaggaaacacatggaccactttttgtaaagataaaaccctatttagacctgggtttaattcccagcacgcacatggcagcccacaactgtaactccagttcaggggatctgatacccttacacagacacacatgcaggcaaaacaacaatgcacataaaataaaaataaatacttcttaaaaattaagagagggatagaggaaagcaccctgtttcaacatgtcaatctccagcctcagcatgtactcccacctgtggatacaccgccttcagtttaggtaaactttgtgtgaattgtatgtcaaagcttttaaaaaaatcttaatttattttcaattatttgtctgtaggtatggggcgagagtgtcagagagtgtagaactggggttacaggtacaaatgtgaacgtgggcaggctcgggtgctaggaacttaatccaggtcttctacaaaaggagcaggaagctggaagagggcataggaccctctggacttggaatctcagtcgttgttgctaccatgtgaatgctgggaatcaaaccctcaggcccttttgaattgctgagcaatctcttcagcttttgtgttagttctcggctttgaactcatggcctatagcttgtagagcaaatgctttcacccactcagctgctgcccagcctacagctagtgactttgatgctctttccctctttgaacctgaccttcgctcctatgcctttcctttcactttgtgcagtgcttcctcccacatgtcctaccagcccaccgacggcaatcttgtctcttgtcatccgccataagcctcttgttttccttttaattttgaaggatatttctttgctagacgagaattctagatacttgatgtactggctagttttgtgtcaacttgacacagctggagttatcacagagaaaggaacttcagttgaggaaatgcccccatgagatccaactgtaaggcattttctcagttgatcaagggggaaaggccccttgtgggtgggaccatctctgggctggcagtcttggttctataagagagcaggctcaacaagccaggggaagcaagccagtaaggaacatccctctatggcctctacatcagctcctgctttctgacctgcttgagttccagtcctgacttccttggtgatgaacagtagtatggaagtgtaagccgaataaaccctttcctccccaacttgcttcttggtcatgatgtttgtgcaggaatagaaaccctgactgagacacttgataaacagcattcttttgtcttcttgctttcagtgtttttaatggataacctgccattatttgtattctttcttaaattatgtgtatatgggggctagagaggtggcacaaatggctaagagcactagctcctccttctgaggatccagattcaactcccagcacctgcatggcaacttacaggctgcaactccagttccaggagatcgacaccagcttctggcctccctagacactgagtgcatatggtgcacacacatacatacatacacacacatatacacatgaaagtgaaacactcatgcacttaaagattttaaaaattggtgtgtgtgtggggggggggggtgtgtgggggtccatgtgagtgcagatgcctgtggagaccagagaaggaatcagatactgtggaggaggaggtgtaggcagttgtgagccacccagtgtaggagccaggaaccaccctggggtccttagagaaagcagcatgcactcttaaccccccagcgtctctagccccaccatgtatattttatttcctgtgtgcagtggtttttggtgttttgtttttgtttttaaatttggtatctttcaagattttcccgtaatttctagcatttaataatgatgtgcttattcattcataattaagagttatcagctgtcagtttattgaaatttaagcttttattttctcaaacctggaaaaactttgcctactttgagtttttcaaataattttctgcctagctcctccccctatgttgtatgtttcattgcgtatggttccagatggagaggaagtaaattgtgcaccttttcttggaagactgttgactctcagtctcgcaaactaactaacttactgggttacattgcctgaggtttatactcttgtcttttgaatcttgtgcctttaaggagggcggttcagggaccattgagggtcattgatttttgtttttttcctgcgctttcttgcctacttttctattgtgttgttagttccacacttggctttcccaccgctcaagcctgaactttgcagatgtttgcttaaggactgaacagttcatgtgtgatgtgtggttgtgtgcctggttcctcctacctctactgctattctcttgtgcgttggtgtgtctatacttgcctgagtgtgtagtgattatctgcaggactggagtttctgctgtgccacccgagagggtaccacatcactctgcttttgtttgccattgactttccatggatgcttcagtggatttaacaacttacttttgtgtgtatgtatgatggtttctcatcaagtgaatatattcgtaatgctctttatcctttcttttacagacaagagatgatttcctaggtcaagtggatgtccctctctatcctttaccggttagtattggcatccatggttttgggttttgtatttgtgatttttttctattttaataactgctaatgtgaatctttagtatatcagctgtttcctgaaatatatctcacttttccttttcactcatctcctttccttacgtgagcttcaagaaactgaaccacagggattggtaggcaagatggagcctggattttaagggcttggaattatccccataaacagcaagaacttgggctcacatactggatgtgagagactaagagaccgaaggaccattaacactcctgagaatggagttggaaacacaagagtgggaaaggcttaggtagcctttcagaatcaaatgtcactgggggcttgcagagatggctcagtgcttcatgggactgatcagaggcctcagttccctgcactcacctgccagcgcccagccaccagaaacctcacttgtatgggatccggtgccctcttctggcttctcatggatcctgtacacattcagtgcacattttggccatatttaattctgataagaaattgtagaaatttgaaagttaatgtgggcagttagtagcagcatataagaaaattgtgtagggaaaagaaacaggaagggttgagcgttcttggtgtctaaatgaaggaccaggtgcaaaaccttagtcaacatgggtggatcaaaagaaagtcagaagacagagtagaaagaaccaaagaaaatactttccaaaaactataaggaaatagcttctgattgtgcatggtcttccatgtaaatacttggaaggaggctaaggcaggaggattacaacattgaggccagcctggctttatagtgagatctttcatgtaaataactttcaaggcgcagagggtagcaaagccatagagaagtaatacaaagcagggggttgctgtgggaaggtggccgcccacactcctctcaacgttggagtttttgcttttgttttagaattctctgtatactcttaacagagtcaagctgctgacatagtacatatcccatgttcctttggggcagggttctgcccatactgtactgtcctctactgcctgggtcctgcctgctcccacatctcagcctacccccctacttccccgcgctccctcccctctgcttgttccccccttagttatggagtttgctggagttcctgtgcaggaagccaaagccatgtggttaccagctgactcttaacaaattaaaccttcttttctcgttcttcagtctgcctttcattatagttcagcagtgctttccaaagtactcaaccccctttctcattttagactgaaaacccaagaatggagagaccatatacatttaaggattttgttcttcatccaagaaggtcagtaaatatgtaagattatagtttattaaggttaatagttttgcgattttatttttattttatgtatattagtgtctgcctgaatatgcaccatgtatatgcagtttccaaggaggccaagagaaagtgtcagattcctatgtggctgctaagaattgtatgtatgttctctgcaagagcagccagtgctcctgaaccattcagccatccctccacatacagtacacatactatagatttgtgtcttcattaaaccttactctcctctttaaaaatccaggatttaaacaccctataaacaagctatttaaataaattaatattatttcttttaaaagctttagttatttcagactataaaataaactcaagtggctggaaaacatggctcaattgttagatgtgcttgctactctttcagtggacccaacacacatgcacacacacatacaacacacatgcacatacacatacaacacacacacacatgcacatacacatacaacacacacacacatgcacacacatacaacacacacagaatcacagtgtactttgttcatattccaaataaaattcttaaatagacacaaaaattaggaatgatttgtcccccttatttatctaatagctgtatttcacgtaaaacaaatgtccagcttgatcggtacaaaaacaaattcagaattaacttgagtatattttgcaaaatttaatttcaaaaacattttagaagattcccatagagaaactagcatgaatagtgaataaaatttaaacccagtaagtacgcttggaattccattttcctgaactgagttacttggttcctttttttaaactaaatttaatctttaaaaaggacctactcactttatttaatgtgtatgagtgttttacctgagtgcatgtctttgcaatgcatgcattcggtggtaaaggaggccagaagagtgtatgagatccactggaatgggagttagagccatattcgagccgccctgtgggcggtggaaactgaacctggatcccccgcaaggtcaaaaggtgctcgtgaccacggagccgtctctccagccctccacatttaaagtcttaagttctacatgcaactccttatggtcttttgtgccacttggccaattaaaatcaatttagaatgtgtaattaattatcacatgtaaaagtaacccatctgggaaaaccatagcacttgctttatgctttctaacaaagaaatgcattgaacagtgtattatggacatttaaatctttttcatttaaaaatggctgctttaacctagtctttgtaatataaatattaaaacaacataaaggatttttggttttgtggttgcttattctgtctgcgagagaaggcctctgttcctgtcgaagtctaggaattgaatctcttttcttcctctcgttttggaccgattgcaatatgtgcataccaagaataactaagcaaatattttcccgcctgttttgctcgccctgctctctgtccctcagattgctgtaaagacatttcccgagttgctgcagaccctaaagcagataaatcctttctttgtggtgttcaagtttcattaataattgttttctttccttcccacagtcacaaatcaagagttaaaggttatctgagattaaaaatgacttatttacctaaaaatggctcagaagatgaaaatgcagaccaggctgaggagttagaggtgagattcccaggaatgtttgcttaggctgaaatggggctgtctgatatcgttcttggtagaaaaccatggttttcaaggaaactgatgcatgcaatgaaaatcaccacgatgttgatttgaccaaatgttccttaagcagttctctctctgacagtatttctgtagagtggttgttattggtagacttacaggtagaaataggaaatgcaatatttatcaatgcaggtgtttattataattatgtcattgtctttaggttttttttaaaaactatgtcctagtctactttacaataagaaaataggtgtttgtaagctaaatctatagacatcgtactatgttaaaattgctctgtttctatatactaattacattagtataaaactcgaaggacatttaattcattttgcttttcttgtcatgtttatttgaagtacattttagttcatggttctcacaggtgacaggattaataaagaatcaaaccaggtgcctgaacagagccacacatctgggcactgaagagtagcagggtggcttgggctttgatagctagctgagcccctggagcaagctagctctgcttcccacagccatgtgacctctgatctgctaggtttttcttttgtgggggagaaggactgcaccaggtcgcctttagggtttcttccctggctttaaaaagacaaaaccacctcctttctgtggtgcccttagagacagttcatcaaaaggtttaaatttaaacatttattctacctcacactgtatgtgtgttctgtgtgtgtgtgtgtgtgtgtgagagagagagagagagagagagagagagagagagagagacagagacagaggcagagagagagacagaggcagagagagagaatgtgcatctaacctgattgttctggaaggttctttcttgtgtatgctttcttccaggcttgtctctctttggttgagggtttgctctggtctctcagagctgtgagaccaggggatatccctgaggtgtgggctctagctcatgtgcttgggtgccttgagcaggaaatgaattagcaaagcttttggtagtctatgtgttagtgagattttactttgtaggggaatgtttgagggtagaaagaaagttgttttttccttaaataatagatgatagatgacccctcattgatgactgaaacttgtcaccgttctcttaaataaatagatatcccctccttgattaccttttctgctgatctgtttgtctttgtttttaatttttctaatatacatttattttctctgaatattttatttctttattttatatgtgtgtttatatgttaggttagtgtatgcttggtactcatgaggtcagaggtgctgttttagatccacttggtctggagttacaggtagttgagagctgctatgtgggtgccggagttgaacccagtgagtggtcttacctgctgtgtctccagcccctgttcacattcattcctttttccttcctccacggagtgtgctcgtgggtttgtgcttgctcgtgtgcatgggtgttccgtagaacactgcagaagtcagaggacagcttgaatgtcccctccttccactgtgaggtctcaccttcattcacagtgcctttattgtggccatctcactggcccacattgcaagcttttaagagatttttttggggtacaaatgtctgtccatggccttgtcacgcagagggattcttacatttggatttctgcttgaaatgaactttgctatgaaggaagaaaaggctttcccagagactttgaagtttagcagcatttcattacatgggagctcgccccagctttgcttgagcatggttcacaggcacctcattcatggtttggtttgcctctgtggtgtagactcgccttgctttatgctttggcctcccatcacaatgtttgaattccttcagaggccaccttataatttcgagagatgtaagcgtgtcgtttgtttatgcaaaggccgaggaattcagacccacgaatgtgcttatttatcttctgggcagcgagagaccagagacgtcttgcctggtcctgtgatgtgtagtttgtgactacatatttcaaattctgctatttgaaaaaaacaacaagtgcaattttggagggaggtgagctctgggcttcttacatttctgagtatagtgtggctctgattagctgtgtgtaacgtttcattttgtgttatttacgatcatctgtatgaattctacaagattaggataaaatgtttgtctaagtactttgtacttgctttctggcccttctgactccattaaattgtaggtatttgcatattggctttaagactagtagttaggatttcttgccttgtagaaaattattttatgaggaaaatagataatccatatttcttagggaagacagaaaatattctttcccagtagtgtttgggggtatagttgtactttctcaaacttaaaaccatttctttttctaaagcattaaaataagaaattaagtaccttttttttttttccatttttcttactgaatttacatgggcaacactaaagcagatctttaaaaagtaatacacattttcaaagaaatgctcttgtgccagggaagcagcttactggtcacaagccagaagctccaagtttaagctccgtcttcagcccacttgatcgtattcctcagtaagatgaatcccctggaagcctaaggcccagctagctcagtgccagaggcagcaagaaggaaccctgcataggagggggaaaggaaaggaccagctcctacagttggtcctctgacccccacgtacatggcatgcatgcacccttacacacttggaatgtgccaaaggccatcagccctccctgcactgggcttcaggccactggtgagtcacctggtgtgagtgctggagatggaagggcaagctctcctaaccgctgagctgtccctctgtagtgtcttgttttcatgttcagcagtgggacctttctcttcttttcttttcttttttttttttttttgtttgcttgtttgtttgttttgagacagggtttctctgtataaccctggatgtcctggaactcactttgtagaccaggctggccttgaactcagaaatcctcctgcctctgcctcccaagtgctgggattaaaggtgtgcgtcaccactgcctggcgtgggattcctttttaaacagcctttcttgttgatgtcacggaatcctagaaggctgcttttcttctgacgtgtccctccgtacatgtaatttatcttgatcacagtcactgccactatctgccttcagctccctccccctccccatcaccttttcctttgtaatccacctttgtgtcttcttttattctccttagtaaattcacttttattgataagaccctatttttctgagagcaaaatagccattggccacattcaataaagaaatcccgggactggtgagatggctcagtggttaagagcactggatgcttttctagaggtctcagattaaattcccagtacccacatggtgccttacaaccatctgtaactgcagtttcctggaacacaatgccttctgccatttaccggcactgcagtgtatgttatgcacaggtactaacatctaaacacataagaatgaataaatgagtaattgagaaaggaaatcttgagctaaacagaataccagagactgttaacagactgtaataaactcagatcatgccttctgagaccaagtcctgagagatgcagtttgactgtacacaggattagagttccctttataaagtagcacattttgatggtctacaagaaaggaagacagaaaaaaaatggagatgaagtaagaggaaaagaagagaatagaatttgggtatcagctcccatagcagtgaaacgagaaaaagagaccacacgtgatggggtccaactttagcttcccacatagaatgccctcccagtaattctctggtcctccctccattccctaaactccctcttcctctcagcctccacctgctgctcttattggccctctcttgtcaggtgcagcctccaagcattgggctgctcttcccagcctgcatctgcctgtacgctcagtgccagcgcagggagtagaagcccagtcagtatgctggggtggatctgtcacagtactgaagacctttcctgtttctctgcttttccattgatttagcagggctagggtgtgaatatgtttatgagttcccgtgtccagtgcagaattcttctcctttgtgctttctggatttgccgtcatgtttcatcgcttcccactctggggcatactgctttacatttctccaaatttgttctaacacaccttgggtttgttttttaaacatttgaatattactcaatttgttgtatatcttggtataagatactaggtagggatgtgaattaattttttcccaacaagtacctattctccaaacaatcttcccatttcgccatagatgtaaaatgtgcttgttgatgccaagttcctctgagttttgttctgtttcccagttgtcttttgagctatgtgtgtgcagcttagaccccgactgttttctatgacagaactgtccacacatctcttctcccttagaatggtgttggttatgactgacttgtttgtgtttctacttgaacttgagaattagctctcattatttaaaaaacatctgtaacataataattgtatcagaattttgacagatttgccctcggaaattgatccatcatgcctgctgtctgtggtgtctgggatggaatgcaggacttgatgcttgctattcccagactctacgaactgagctacactccgcagccgtgtgtgtgtgtgtgtgtgtgtgtgtgtgtgtgtgtgtgtgtgtgtgtgcgtgcgtgcgtgtgcgtgtgcttgcatatgtgtgctcgagtgtttgactgcatttatctgtgaaggccaaagatatcagatctcctgagactggagttacaggaagttgtcagccacctgatagtggttctggtaaccaaattcaggccctccgcaagaacagtatgtgcttgatcactgagcaaactctcaagcccctgttacaaggtttttaatatgaacgcatgttaatacttaataacttttccacttaattccttactatttaactcccatagggttttgtgcattttgtttctttaagacccaaattcctgggcatttcttcttttaaaatttcttgtttgagttttatgacttggccacaatgcttgttctagggttaggggagaaatagaaaatgcagaccccagtctcacagtgacaggtctgtcatctcacactcacccacacatacagtctgagtagtgactgtttcttagtcactctcactgcctctgttgggcttctcagggttggcctcagtggacagcttttcatgtctctagtgtctgtggatctctttccctgctggcttcagctgcttgtggctgagagagtggctacggtcatatggctccaattgggttcctcgtttccctagcgcccccatgtcacagcctcattcagttatgaagggtttggtcttgttgtccgtgttgtccgtcgttttttcagggggtttattgtctcattctgtttgtctgtttgtttgtatgttttgttttgtgttttacgctttttggaaataggcattttcaaacaacttttaaatgtttctgcaggaaagccttgcttacaaagtattcacattctttgagaattgagcatggactaattctgttatgcatatttctgaaattgaacataaattctcttttaatttcctttatttttgctttttatttgtaatttgtaggttttttgttttgttttgtttttgagtcaaacatcagatcaagctaattgcttccattctgtttttcagcctggctgggttgttttggaccaaccagatgctgccactcatttgccgcatccaccagaaccctctcccctacctccaggatgggaagagaggcaggatgtccttggaaggacctactacgtaaaccatgaatctagaagaacacagtggaaaaggccaagccctgagtatgtgccagtctgcatagattttgctgctccttggcctgttaatgctgtgattcgagtaggcgtatagtggtatagggacccctgaactgtcagctaaccaccattgaaaaacttagttagctgtgatttttaaaaaatgatttgatattgtttaaaaaatatttggaggccagcaagatggcttggtgtatgaaggacccttgctacccagcctgatccccaggtcccacatagtagaaggagagaagtgattaccaaaagctatcttctgaccaccacatgtgtgtcatgccatgctcacatctatatacacacatgtaataaaaaacaaagcatatcttgaaaaacaattttaggctagagctgtggctcacttgcctacaggagaccctgagttccgtctccagcatcacataagacgacatacggtggcgatcctctaatccctgcacttgaaggtagaggcaggatcgcaagttcaaggttattcttaactttctgcagtgtttttgtgctgctagagtttggagccagtgcctcattcctgctaaacaagttctttcccactgaaccacaacccagcacttcatttttaaaatagaaattattgttaattcacagtgaagacactaatgggtcctttcctaacacccttctctaatttagatggtagacatagatcttcccacatgcagatgcaaggcagaataaccttggatatgttcatgctcatagctccttagtggctttttttttttttttaagtataaaactgcactgtgatctcatttggagttagaggtttaattcactaggaaagtgcttggctagcaagcttaaggcccctagttcaatctccaggacgaaaacagatgaggaaactaacaacaattgtgcatgttattcccagaatcagatatcctcctgtcttccttctcctgtagcctcacgtggctgttttcaatctttgagtgctagacacatccttatcatttatcttactagtccattcacctccaatacatctgatacttcctaaaaattttttcctgtctgttttcaaaccctccaaagtagactagtggtcacactctcaagcacatggccatcaggatctgcgcgatcacacaccaagtacaaagtgggacagtctgtcaagctaccctgttgtctttgacagacaggcagacctgccacacagaatcgtgtgttctactggtggtgtcgatttcaggtggcaggatgcagatgcaagaaaaaaaattaaacatttcttagatccattagtcacaatttatgtttttacaagccacaatagagaatgattttcttgtggctggggggtacgggaggtgatgctgtggacagtttgatatagttctcatgttctgtgaaccggtaaggtatctgtggttggtaatgctgtattgaatgtttgtaaaagcaaacgaggatgtcacccagaagtgatatgaataagtgatatgtacgtcaagcactcccatctctttatacacagtcactaacagtgtgtgcacccatggaccacatagcaccccaacctgtccaatgtcctgcttttgtttttaatttttactttattttgtatgtatggctgttttgcctatatgtatatctgtgcaaaagacagtataagagctcctggaacttttgggtttttggtttttcgatatgggcttactctgtatagccctggttgttctggaactagctctgtagaccaggctggcctcaaactcaaagagatctgcctgcctctgcctcctaattggtgtaattaaaggtgtatctcatccactatggcaaaaattatattttaaaagaactgattttaaaaatggaaatagtttaggatcgtttagaaactatcttggtctaatatgacatcaaacaaatgaatattttgggggccattaagatggctcagtgagcttgattcccctgaaccaacaagataaaaagagagacctaattcctgcaagtaggtttctggcctccacactcatgcccagggcacacacatgtataaacacctaacacataaatacttaaaaaattttaagttaagatttttgttcccgattgtatgaataaaattcctgatttgtctcaatatagacagaaataactaggctattgtaacctagacatgcctaaagtttgtgcttttcctggacttagatctctattaaattttcagccgtagggtgcttgtactgcctgccattcctcttctgcatgcctgcatggggagtatggctccctgctaagaccgagcccaccagttaatccattcatgaggcatcctgttactttagaactgccttgggtttctatctcaggctgacatggtacaagaataataaacaaatttcatgtcaaacatcatttgtgccgttagttttctcagctggtaagaggaactgtagttgaggacttgtcttcatatgtgcctgtggacatgtccgatgggcattttctaggttgatcattaatgtgagagggtacaacatactgttggcagtggcaaccctgggcaagtggtcctgggttgtatgaggaccagattcttgcccttggtgatgactggagcctgtaaaagaaaatcgccttttccttcctgggttgctcttggtcagggttttatcatagcataagaatcaagctagcacagtgatgaactaaatatcagctcttaacacatttgcatgagatttctacttccaatgtacattttcttctgccctagtttcccagaccaaagtgttgacagtgtgattagctttggtcagaacccatgaattcaatctagggatgagtaagcacagactctttgattatgattctaactgtaacaaggcaggggtgacgccttcttacacttctgccctagcgatgacctcacggatgaagacaatgatgatatgcagctgcaagcgcagcgagcattcaccaccaggcggcagatatcggaggatgtggatggccctgacaaccgggagtcccctgaggtatgaacccttccttctcttgttcccgtgtccggcacatgttatgcagtggatgagtgtggactctgctcttttcagaattgggaaatcgtacgagaagatgaaaacaccgagtatagtggtcaggctgtccagtcacctccatcgggtcacattgatgtgcagactcaccttgcagaagagtttaataccagacttgccgtgtgtggaaatccagccaccagccagccggttaccagctcagtaagatgatttagatcttgtcatgaatttgtgataccttgtcatacattgatgtaacagcgtatgttttatgtagacttttgtcttcagtgacatgccatagtaacatgttgggggctttcacttacccttccactaactccgtggagcagagcgtggatagttctaatggaccctgtgttctcgggtccttcacccactgccaccagaaacacggaagccacaagctgtggttcttggtcgtttcacacaaagaatcatggactggcagtgagagggtgccagcgaggacggtggatttgattccttggggaattttaaaagaggttgggggagacaggagactactctagatgttgtcaggaagtggaaagaattgtgtttgaataactcagatctcctcctgtgaggacacaactcgatgaggagaaagaagagtggacatgacaactgtttggtattttgcagcttaggtagtgggtttgtttcattttgtttcttggttttgttttttgtttgttgttgtttttcctatgttcagacacaatttagacggcaacttgaatttgccatgactctgtctgtgtgtgccaggttagttcatgagtggtggaaactactgctctatcttggttgtgtgagttgacattgttttttggggtgggtgttttttgttttgttttttaaagattttgtgtgtgtgtgtgtgtgtgttgactgcatgtatgtgtaacatgtctatgcttgataccctcaaaggcccaaagtaactgacagatccccagcaactagagttagagacagttgtgaactaccatgtgggtgctgggaattgaaccctggtcctgcttttacgcacttgaactgtatctctattccctgtatgaggttttaacataaaatcacagatgtcacccatccgtacacatgtgtagattagaggcatattggttaaatgaggagagaagtaatggtttcattcactgtctacagggtccacaaacaagcaccccagcatgcatctaccacccctgtgggagcctctggctggccaggtacaaggtgccataaccactcactcactgagacttcatctgtcctaaagtggacagaacaccttgatcttcaggacttcattctagtgcagggtcattactgcgccctgcgtgccaaatctgcagctgcctgttgccataaataaggtgtcaatggaatccagccattcctacttgttcatggccatgttcaaaccacatctcagagccaagcaattagaactagcattcagtgttgcacctcagcgggtaattatttgctaagttctagctccttcctcaagaagtttcacctatgggctggtgagatggctcagctggtaagagcaccgactgctcttccgaaggtcctgagttcaaatcccagcaaccacatggtggctcacaaccacccataatgagatctgatgccctcttctgatgcatctgaaaacagctacagtgtacttatgtataataataaataaatctcttaaaaaaaaaaaaaaaagaagttctacatagttgtatgtccctacctacgtgagtatccgtcaggttgcctcttcaccggcctccttttctttctttcttccacagcctattcttttttccatttgcttaatcaattaatttgtcaggggtcaaaggaaaggattcatcagatttacagaataggtatggggagatgactcagaaaagtatttgccatgcagataaaagtccctgagtataatgcccagaacccatgtaaaataaaaaccagatgcagcagtgtgcccatgtcatgcttaggccttctatgagttaccgtcacctgttaagaatattcttgaaccatttcatgaatgtgttgaaacctgagacagtattgaggcttacaaagtaaaaaatggttcttccttcttccttccgaattacattgcctcagtgactactaatggttttaaatgtagtgtcttaaacattacatatttattcataaacatacatgtatgcacatatagttacatacctttaaagttttttatagaagatttattttaatgtgtatgtgtgcatgtttatatgtatctgtatatgggtttgtgcacatggacacatgagtgtagtgcccatggagtccagaagagaggacatcaaatcccttgaagctggagttacaggtagttgtgagccacctgataggtgctgattccaagatatgtacctctggaagagcagcaagccctcttaactgctgagccatttttacaacccctatatataattttaaagagtgtgtgtgtgtgtctatctgtctgtctgtttgtctctgtgtgtgtctgtgtctgtgtctgtgtgtgttgctgttctgtgtttttgtgggttggttgatttggggtgtgaggatcaaatagctttatgtgtgcagagcgtgtgtctcatctccaagcctcactctagttccctgtggtcatcttacacatcccttttggttattatttttcacttgctaattgaactgtttccatggatatcaatgtacttcttttaaaatcactaaaactagttgtcctgaaaatatccaccatttcctgttgtgatgaacttatgttgtttaatcatttgtgttatcataaacagtacagtttgggatattctgattttatgtatgtgtatttgtaagttttgatgccatttaataacaaaaataagatatttcagttagtggttaatgatcacggtgaaggggaagagagaatggatttccaggaaataagttatcagagtggacacccagtggtgggctgtgagtccagaagtgtcgagatgaggaagggccaggttctgagcgggagcacagtgtttggtgctgaacatccaagtactcgatgaaattttgttgaaggcagtaggcagagaacaagcgtgttaaatccagccctctggctacagctggaaatctggacatgcagaaatgagggttgaagcaggaagcccttgtcactgtcagagtaattaaggtgacaaatggtgaaattgttttatttgggtctagcaagaaaagccatgtttgaacttgctaggaatgacagtgtgaaggaatgagttagagtgggtatccgcagggaaaatccaagtccagtcgtgtctacaactacattggaggaccagaaggtggaagagccagggtggagggcggggagagaaggcatcccccgttttagccaccccaccctcctggcatgcttgctgtctcctacagtgtcaactgtaccctccctacattgcctgtgctctgagtgcaaagctaaagtgttacttgtttcctccccttaagaatcattccagcagaggaggcagcttgcagacctgtatctttgaggaacagcctacacttcctgtggtgagttttctcctctgcctcagccaagaatgaaagaaagattcaaaacctcagctaatttttttgatacttgtatatcacaacactgagtgtgtgactgcttagcaagggactagggagacatggggcacaaccttggaagtcaagcctcaagagaactgtctctcttgtaaagcaagccccgtgctcatgtgatggtggcaggtgggatgtggcttctcagctgggaccctgctgctcagaggtgatgggccgctgctaccccacatgtgatacacagcatgcagctgtgtactgacatgcgccacacagccatatctgccctttgtgtgggttgtctacccagtgccctctatcatttggtccagtatgtggcagccaggtcggcattttcatctcccagcgtctcccttggcagtgctctgattcagcacagaccgcccatctccacagtgcttctcacctcttcttcctggctttcctctcgttatgccaaggtctcactacctcatgtaatcactttactttgcttgtgagtcgacctcatatctcccaacccttcgatgcccgttcttcctcgtgctagaattacaggcatcgtgcaccatgcttgatttacaaagctctgaggctcccgtgtcttcgttctaccctttcccttgcctgctacccgccaccttggctcctgtctgttctcttccaaacacctgaatatcctccttttaattctctattgactcatctgatatgtgcacatcccattactcctcttggaagtccctcctcacttgccccctggtcagtacacctttaactgccattctatatatcagttttgaggaaagagatggggtgccgaggctcaggagagtgtcttatctgtcttagaaaaggattctttccagtcctgtgctgagttcacctgactctgaagaccactggcctagtcatcatgacagtagatcgtaggggtcaagaagggactcccctgttatcttgttccggtgtccataccctggcttgtctggcctccttttagaccacagcatgtgcaagcaaaagccgaatctcactacagtcctggagctcacttggtagatcaggctggcctcagactcacagatccaccttcctctgccgcccagcaccaagtgaattgctatgttttaaaaatatgttttaaaatatgatttaaaatgtggttcattgttctaaattttaaaacgagttgtttcagagcaccagcagtgaagaaaggcaggaggcttctgtcagaaattcctcctggttaacactgaggggtttttttgtgtctgtgcatattagcttttgcctacttcatctggattgccaccaggttgggaagaaaaacaagatgacagaggaagatcatactatgtagaccacaactctaaaaccaccacatggtccaagcccaccatgcaggtactctgaactcttagcttgtctttggtaagctcagacctcacacttctagagcaagagcagagtgatgacctgctccttcagtgattgtgttgtttagttttggcatgcatgcctctgtgtgtgtgtgtgtgtgtgtgtgtgtgtgtgtgtgtgtgtgtgtgtgtgcgcgtgcgcgtgtgcgtgtgcgtgtgcgtgtgcgtgtgtgtgtgtgtgtgtgcgcgcacgcgtgtgtgtgtgtgtgtgtgtgtgcgtgcgcacatgtatgtgtatgtacaagtgggtatgtacacgtgtggggttgtgtggggggtgcgtatgaaagactcatgtggaagcctagagttgacactgtgaattcctcaattgctcttcatgttattatgtatttagtcagggactttggctgaatttggagttttctctaggatttggtctctagctctcaggcagtgggaccatagactggccgccatgcctgagtggctttctgtgtgtgtgctgtcgatctgtactgtgctctttacactaatgacaagcattgtatccactgagccagctccctgggcacttcttcagatagtttgctaagctaatcttgctgactagtgtctgtgcaagaagtttataattatggggatgaagagtcggctcagtgtttgctgcttttgcagaggacacacgtggtggctcattcgtaactccaggtttagaggatgcgatgccctgtttcagcctcatgggcactgaatacatttgtgtgcaaccatacacgcagacaaaatactcattcagattaaatatataaaactgtaaaagaagtttatgggcctggagtgatagctcagtggttaaaagcactggcttccaaaggtcctgagttcgactcccagcaaccacacagtggctcataaccctctgtaaggggtcagatgtcctcttctggtgtgtctgaagacattggcagtatacccacatacatgaaataagtaaatacatcttttaaaagttttatagttgtaatgtttattttatcaccatttctttcactgaaattttttcttttcacatttaattttttatggggatggataccatagggtgtgtatgtgtgtgtgtgagcgggggtcagaggacaacttacaggagttggtccttccttctgccatgtgggttctggggaatcaaactcgggtccttaggtgtagcaagcacctttgcccactcagccatctcactggccctaaagccacttctgtgctgaggctgttcccactgtgactcttacagggcaaagcgagctttctgctgtgggcactataaacctcccaacccctttcaggctacacaggctgctactctggcttcttggacagatatgttcacagcagtcaaatcttactgcgtgttaattagctgagaaaattgttataaattagttgactaaattattataaatgcaaagtttgatagaaaattttatttaaaattcaggaaaaaagattttttaagagtggtttaagagcacctgctggtcttcccgagaactgaagttgtgcccacgtcaggacctctgacctccatgggccctgcaggcaaatccatatgcaggcatgcagggccacatagtaagattaaattgctacaaattagcctcagaggtttaagacttgcttgcaagtgtgccttctgtttataggttaagctagctattttaattctattatttgtgagttctccatagatgtaaagtatgacgtaattcatgtgccaggccacattggagatagtcagctgccatcgagccagagttccgcaggccctcagccagagctcctcaccagggaccctgctaaacaggcaaatccgcattctaacactgagcaaagattccttcctgaaggttggggagtctggcatgcaccaatcaaaggcctttctttattgaccacaacacccaagactgccacctgggtagcttccttccatactcctcactttaaatttatagcagcaattgcttctcaatgtagtcacatgtgctggtataatctgcctttctttctttcttttttttttttttaagatttatttatttattatatgtaagtacactgtagctgtcttcagatactccagaagagggagtcagatctcattatggatggttgtgagatggttgtgagccaccatgtggttgctgggatttgaactccagaccttcggaagagcagtcgggtgatcttacccactgagccacctcaccagcccgtaatctgcctttcataagaatgaattacaagtaaaaatcttggggtttagattttgttttggttttttttggttatttgaggtaaggtcttatgtagctcagactgttctagaacttgctgtataactgaagctgaacttgaattcctgatttgcctgcttccacctcctaggtaccacacagaggccctgtttctgtggtgctaggatttatttttattttatatacattggtgttttgcctgcgtgtatgtatatctgtttgaagatgtcagaccacgtggaggtggattacagattgaacttgcatcctctggccgagcagcgccaatcttaaccactgagccatctctctagccctggaagccagggctttatgcatgctaggcaagtgctttccaattgagccacctctccagctctagggaatcttaatattattttattcaaggtacatttatgcttcttttgacttagattagattttatgaaggtgttccattttctagtttttggttcactcgtcttaaaaacttaggaagacttttagtaataattttctacctctatatgagacttactattttcagagaactttcaagtttctatctcatttattaatactcccagaaagactctgtgaagctaagatgaacagatatttattgctattattgttgttttcagaatttatttacattattttgcatgtatgactacctacatatgtgtccatggaggccagaagaggtgtcaacacttaagacttaagaactattttaaggggctggtgagatggcttaggggttaagagcgccgactgctcttccaaaggtcctgagttcaaatcccagcaaccacatggtggctcacaaccatctgtaaggaaatcagatgcctcttctggagtgtctgaagacagcaacagtgtacttacatatagtagataaatattaaaaaacaaacaaacaaacaaacaaacaaaaaaagaactattttaaaagctatttcaaaggtttgaatagctaaaacaaatctaaaagagtttaataacttagtataataatattaaggtaattatactttaactaatccacataaactgaacttggttctctttttttaagattcaaatagatcttagtaaccttttttagtctacccttctttcaaagaaagaaaatcaatattcagataggaccacaatatgtgattctgcttgtttattcattcatttgtttgatcacacccatgcagttatttatcctgtatgtgcacatgcatgtgcacagcatctgtgtggagatcaggggacagttaacttgtaggggcctgttctatacttctgttctgtcatgtgagtcccaggtatcacactcagattatcagacctggtagtaagcatttagccccctgagccacctcaccagcccagatgtggtccagtctaatgccaccatcttataccagtttctgtgcagagaaaaacttgatgtagtttgggttccaatggactgggcagaatgttctcagaggcttcgcagtcggctgaaatgggtctcagtggaagacatcactcctgagcccactggggagtggcgttctcacccatcagtaggacctcccagcagtatcttccagaagtagaaataagtcacaaggaaaggaattaaagatgaagtacagtgaggtggcacagcccctagccctaccactcaagaggctgtgcggtaggaacacggggactccagcgccagtctgggctgtgagctcttgtctcaaaaagccaaaccatcggtgtaaatgaagtataaaagagaattttatttatttcattattttttcattttcatgtgtgtgtgtgtgtgtgtgtgtgtgtgtgtgtgtgtgtgtgtgtgtgtgctacacatgtacattgcctgccatccaaggctagaattagagtggaccatggtgcctgcctggtgtttgcttattcttagaatccaggcttctgtcctcactgttgcatggcaaatgctttaactactgagctgcttctacagctccaaagagtattttaaaatctattggcattacaaagcaactgtagcacaatgactggcattattttaaaatgtgtatgtcgttttatttatgactaaaacaaataaaggatgatccaagatcgaaaatccctgctcatctgagaggaaagactgactccaatgacctgggacccttacctgtaagttctcctgctgagctcacttcactatttcagacattttgtaccttgggatgctggagttacttaacaactataactaacattgttaataagttattgatgcctttcgttttaagtgatatgtacaaattaagcatatatgcaatatgagatcttctatttctgtttcttttttttttttttttaaataacctgtacatctaagacctggtactaaaataattgcaatgaatgtttccttacagccaggctgggaagaaagaacccacacagatgggcgagtcttcttcataaaccacagtacgtgctgcatggcttctctctggcagttgtttgtagtactcaggtgtggacatgaggaagaggaacagctcttttcttttctttttttccctcttagatataaagaagacccagtgggaagatcctcgcctgcagaacgtggcaatcactggaccagtgagttctggaatctggtgctctgggtcggggtgaaactagaggaacaccctcctccggcctctcttttctttgaaaagatagtgtgaaagcctttttaccctgctcctcaggcttggacagccagaagcagtcagggctgggcgctgtgggggctggggcagtagactgcccagtccaggcaggctaaagtaacacacaaggcatcaggagcccggctggggcggggtgagtggcacctccctttcatctccaggatcacaccttgaactagatttttagtcaaagccattgcaaaatgcctactatttaagccttattcatgttttgtataaatatttcagtgtcccataattatactgatcttgagttaggttaatttataggaaactctgccatatagctacttgtttttgtttttgttttttgtttttctgaaacagggtttctctgtatagccctggctgtctcaaactcagaaatccacctgcctctgcctctgcctcccaagtgctgggattaaagttgttcaccaccactgcccagcctactttttttttttccttcagattttaatacacaaaattaatcaaaattggatatacaggtttttgggttttgttttgtttttttagtatctagcatgttagtgtgtactctttaaatgataagtaagtaagggaactcctgggagtccatgggaaacaatgtatttttcaatgtttcctttaacggagaaggcatttttttcagaagtagcatgagctgcgaatagtggcacattatgttaacaacataagtcaagtacgttgattgctgtgacttcaaggctagcctggtctacatagagaattcacagatagccagtgatacatagagactctctttacaaaaggaaagaaaagcagccgcagagactgctgaatgctattttacttttaagagaaattttttaaaaattaagttttctgtttgcttttcttcatatgaaacttcaatttccaagtaattctttgttgttgtaaatactcattaaaatatccagggggagaatataatgttgtttggaataaaaacgacctaaacttccttcattttttttttttttcaaatgttttcaactaaaggcagtgccctactccagagattacaagagaaagtacgagttcttcagaaggaagctcaagaagcaggtgggtgacgtcataacagctgctcacagaaaatggtggtgtgtgtgtgtgtgtgtgtgtgagtgtgtgagtgtgtgtgcgtgtgcgtgtgtgtgtgtgtgttaaattattttcagagacccatttattcagcctgtatgagtgttcttcctcatgcatacctggtctggtgcttgtggaagcaggagagggggctgggtctgcagctgcagttccaggatggttaagctgtcctgcgggcctgaatctgggtcctgtgcaagagtagggagatctctgagccactgagccacctcttcagctccatgatttttaaaagattattacttttaaaggctggacatggtgatgcatgccattaatcccagcactcggaaggcagaggtcggtgcctctccatgagctcaggaacaatcaaggatgtgtagtgacacctttcaaaaaacaaaacaaaaggaactacaagtttaattgtgtgtgagtgctgtagctgccaaggtgtcatgtccgctgtccctataggtggttgtgagctgcttgccatgaaccctgtgagctgagctcaggtcccttacgtgagcagtgcgtgctcttacctgctgagccacctctctaaccctgggatgcgtgtatttcagataacttataagtagcatgcttacattcctgtgtacttttcaggagtctttgtaatttagaaaaagatcatgggggctagagagatggctcagcagttaagagcactgactgctcttccagaggtcctgagttcaattcccagcaaccacatggtggctcacaaccatctgtaatgggatctgatgccctcttctggtttgtctgaagacagtggcaatatactcctatacattaaataaataaataggaaaggaaaaaagaaaaaggtcataacacagttgctgtagtctctctcctcctgtttttgttctttgtaacttggtgatcaggagattttctttcttggtgttttatgtttgattgtgttccaggcttctggacccttgactaccttaggtgttaatagccatctattctcagctttaagcacaatacatgtcaacacaatttaaaagttaacagtgtggctggagagatggctcagaccactgactactcttccagaagtcctaagttcaattcccagcaaccacctggtggctcacaaccatctgtaatgagatctggtgccctcttctgacatgcaggcagagcactgtatacaatacaatacaatacaatacaatacaatacaatacaataaataaataaataaataaataaatctttttttaaaaaaaagttagctgtgaacacagtgcagatgtatggtattgttactcatttccttatgcttggcagatacgtttgttactctttcccatgaccaaacttcattatgtttattattaaatgcccatcatttggtataactagcattttaaatgccttcctcgtggaatggtcccttcctcctttccctgcagtttaggggcgaggccactaggtggcagtactagttgtgcttttttgaggggttccaagctggtgacttccagggattcaaaatggtgggttagataccagagtttttcatttacaaatttaacaaaatgaaacacttttttatttttagtgtacatattatattccccaataaaatttttacatagaaaaggccttttaaattcttcagaactttttccttaaacaataactttgtgtataaatttctatttttaggcattgtgattttaaagcatttgatgagggatatgggtagattgacctcttcagttcgaggcctgcctggtcttcatagagttccaggacaagggtttcacagagagactcgatctcaagttaaaaaaaaaaaaaaaccacaagctttttaaaataagggagcttgggcctggttgtgcacacctttaatcccagcactcaggaggcagaggcaggcggatttctgagttcgaagccagcctggtctacaaagtgagttccaggacagtcagggctatacagagaaaccctgtctcaaaaaaaaaaaaaaaaaaaaaaaaaaagaaatcataccacttccacactggatatggggatgcataacaataagtccagactgggtgggttgggagtgggctttgagggtttctaggctacccggagcaagtgaatggcaatcctggatgacaaaaatggaccctgtttcttaaagcagggtggggaaagaaagttcagtacacctaagtggggttgtcctggtggccttacttaaagggaaagggtatcggtgcctggtgaagtgtgggaaacacactgggctattttaaacatgtctctctccctggctctgcagactgacattccaaacaaatttgaaatgaagcttcgccgcgcaaacattctggaggattcttaccggaggattatgggtgtgaagagagctgacttgctcaaggccagactctggattgagtttgatggtgaaaagggccttgactatggaggggttgccagagagtggttcttcctcatctcgaaggaaatgttcaacccttactacggcctgtttgaatattctgctacgtaagttcctgctgcctcagcctcctcatttgctaagactcagccacacgtccttacactgttcataaatactttaaatggctgtgcactaaattatagtctccaaaactaggttacatgttagaaagcatgggctacgtgatcggggccacaaggagatatttcagaaatagctttttaaagattgttttataggacctgaaaattgtatataatgtacatagaaattaccattttaaccttgtgtgtgtgttgtggattgcacgtggtaggcaggccgtcctccacagaatgcccacctcacagacctctgtaagcacacacttggctggcgtttcaagtgcttcctgtattgttgatctctgtacctttcccatcctcctgaataattctacattcattaaacacttttcccaccatatacaggcagccaccagtctgctattctctgtgcctctgactacatccatacattagatgcatgggaccatacagcactgggctgaagtgtatggattctgtcacttaacatatgtcaagtgacatttccttggaaaacatgaacaaacctctcttaccaaagatagggtaccaagaacagaccaaccttttattcttaccaaagcccaacatggaaaaccaatgggctaacttgaagaacttttgagacatgtgggtgagggactcttctggcatcaggcatgactcttgggcagcagagaagcccttcctagcatgggtgaggccctacaaaggctgtgtccctggagctccctgcatgaccacaggagctctgttggtcagagtctcttctcccctgctgctgctttacctcacccaggggagtggctttgtagatcttttacgttttcataacttcctggatctttgtttttagtttcatttaatgtgaatagtttttcacctgcatgtatgcctgtgcaccatacgcatgtagtaccctcagaggccacaagggggcaacggaactgatgttccagatggttgttagttgccatgtgggtgctggaaattcaactgcaggtaggtcttctacaacagcagcaggtgctcttcctgggtcttgtgagcctctgtgtctttccaggggcagtatttgaattcaattcagagaaattgtccaacaacctgtctttaaagtctagccatggtattccaagcagaaaggtttttttctttatcctttgtatatacaaataaaatagtttttaatctatctgtttacgtgtcctttgggactatttccatctttggacagaagtgactatttaagaccattatcagatccagtgattttagcacaggaaaataacaaaaggggagattttcataatcgtttatttacataaattattttgttctatgaactattgagagggtcacatgagtctggtttgtctttccagggataattacaccctacagataaatcctaactcgggcttgtgtaatgaagatcacctctcatacttcaagttcattggccgtgtggctgggatggcagtttatcatggcaagctgttggatggttagcatcatgttgcaatctttatgtgtttattgttgttgtttttgattttaaaaaatcttaaaaatactttatttcttacaagggtttttcatccgtccgttttacaagatgatgcttcagaaactgataacactgcacgacatggagtccgtggtaggtctcttatgcgttagaatacggagggttcagtgggcagatgatttcttgcagaattggcttaatggtggtggcacctgcttagtgagtgctgtacctctaagtggcatacataacccagataatttatattaaaaacagaaattcataaattttaatgtgttaaaatatagataggggctaaggagatgggccagtgggtaggagcatttgctgggcaccaaaaaaagcacaggggccggagtttacatcctttcaccacagaaaaagttggttgtgtctgcttgagtgtctgaaacctcagcactgttggggatggaagctggaggatttctgggctttgctacctacccatgagctcagtttcagggtcagcgagaagccccatctcagtgagacaacgcagagggtgactgagcagggcccgtgtgcccagtgggtgcatgcgcccactacacacatacgcaggcacagtcatctgcatacagaaatatgcagatgaacatttcccctcatagaatacattgaagggacttcacagtgagtacttgcatctctactgtctactgcactgacttcattcctgcgcctctgtccatcagtccatctgtttctcaggcactgtaactattaatcacatcttctgctgcaaccttttaaatttacatagcttgtttgtgtatgcatgtaggcaccacataaagagggagccagttccattgtgtagattccaggattgattctgctcattaagtggcacctgcctttaaccactgagccctctccgtacacattttaattagatttattaaatttacatgtaattatttttattacatttgtttagtggggaagggagtgttgcttataagtggcacacccgtgaacgtcaacagacacttggccgtagttgcttctctccttctgtcctgtgggtctcagtgatgaactcagactaccatgctccgtgacagttgcctttacccactgaggagtcttgcaagacctgctaggttctttatgccacatagtagttagataatcttttgcatcacgttttgcgatatagttacttacaatgaatggcaaatgtttaaagccgtcactacaaaggcagagtgttggggcagggttcctgtaagcgaacagaagcccaaggaccaagtcctgtgtgtggctctgtgcagtgtagatacacatggtcagttacaaacactatgatttttatgttatgtgtatgagtgtgtgtatgtgcaccatatacacgcctggtgcgcttagaggccagaaagagatgctgtgtccccttaagcttgagcagcagatggttgtgagctgtgatgtggccgcttggaattaaaccttgttcttctgcaaaagcaaccagagcttttacccgctgagcggctagctctctaggccccgattgattcttgtgctttttcttgttacttgagaccgtgtcttacggagaacagactggcctcaacacactatgtagccagcgatgacttctgaccctcctgcctcctcttatgggtgctgtggttacagctacaccaccacacctggttcgtgcttttctaggaatcaaccccagggctttacacaggctagtaagtgctccaccagtttagtgagccgcatccccagcaggagtctttggatattgtaagagcacagggctattatttgggttggttaaaagataacatacttaatttgaaacttttgagtaccgggcagcagtgaactctgacattccacatggactcatctcacagtcctggtgctgggagctgaggtgtgtgccctgcgcccggcatttcctcggttatggtggagatgcagactcagaccctcatacttgtgaggcgcacgctctgctgcctgagcgtctcccagcccgtcagtgtacttgtcgtgcctgttgaggtatctttctgtatacagattttttaagtgagtttttccttagggctgtagctcagtggtaaagcacatgcctagaatatacaattctaggctgagttcaattcctagcactgcaaaattaattgattaattaattggagtgtaattttccttctaggatagtgaatattacagttctctgcgatggattcttgaaaatgacccgacggagctggacctgagatttatcatagatgaagaactttttggacaggtctgtggactttcagatactaaacatcctttgcaaaaccaatcctgtcacctaattataggcgtcagtacacccttgagacacttttgggctcagcttatacattcattctctggtagcaaaagctgtctctcagccagcatttgtatctgtgctgacacatgaccacttctgtgtttgtctgagtagaacttatgtttaaggtttcttagcttttcacttttgagtggatttaatttaaaacaccaggcttctggtgtaattcatgtgcgcttttctcccatttcccttacaaaaaccacattcatgtttactttagacacatcagcacgaactgaaaaccggaggatcagagattgttgtcaccaataagaacaaaaaggagtatatctagtgagtacttaatttctaaatattttctagaaataatcccatgctgcttttttctgttccttctcctcctcttttcttctttgagaagatttttcctttccttgttctttcttcccccgtgccagaatctcagttctcttaggacaagcacaccctagttctccccgattctgctcagcttttgccttgggcccagctccagtctctctgtttctttttttttttttggtttttcgatacagggtttctctgtatagccctggctgtcctggaactcactttgtgaaccagggtggcctcaaactcagaaatccacctgcctctgcctcccgagtgctgggattaaaggcgtgcaccaccatgcccggctgtctgtttcttttttgttgttgtttttttcaagacagggtttctctgtgtagccctggctgtcctggaaatcactttgtataccaggctggccttgaactcagaaatctgcctgcctctgcctcccaagtgctgggattaaaggcgtgcaccaccatgcccggccagtctgtctgtttctaagtggtataaacatgtcctaaaattgtttcttggtttgtattgggggggaaatggaaagaaatgttttgttttgtttttcctccttttagccttgtaatacaatggcgatttgtgaaccgtatccagaagcaaatggcagcttttaaagaggtaggtacacagcactcttgctcaccatacccagacttccaagacccacacatctgagagggtaagatgtggtgggctctgtaaagtctttctcaatatgtttctagtttgattttatgtttttaaaataatatacatatgcactcatggagatcagtaaagaaccccctggagtgtacaagttgggtcccaattctttcttctagtcccatgctcccagaaataagactcagacccaagtcttacaagtaccctggccatatagctaggttcttctctgactaggatcataacttatagataacacatttatttcaatctttattctgccatgtagctggttacctctgctcaggtgctatatgtcagtctcactatatattcctgggcaaatcttcctgctctgactgtcttcaagaattcttagaatcttagtgggaagtggttagggaggctcaaagcgggattaagctggggactagaggaactcagagaaaaagccatgagcaagcagctgtgccagtgagaacgagagtcttcagtcctccaagtgggggaaagtaaggtgcagaggtgctatggttgggggcggaggccggatgaatgcaagtccaagggcagcctgggatacatagtatgaccctgtcaaaaagggagtagggagagagattgtagtattaagagcaggctgggagggctcagtgggtttaaggtgtgtgctgccaaacttgaggacatggctttgaaccctgggcacatataatcacttagtggaaggagaaagctaactcctgcaagctgtcatccaactgccacacacgtgctgtggaacatgtgtacccatacatttacacagacatacaggcacaaacgtgatgttttagacaaaaatcaaatagaatagaaatacaaagtgtttaccagaccgttacagtgctgaccttggctgtgtctgcagcagggcaggtggcagtgtggtggaggggcagttggcgtacaaatgactgaatttagctttgcacactctgtgtacttgtctgtgaaaggaagaagtgagaggtgactttgtgcaggcttcagtgggtgaaggagaggagcagggagctgaggacactgcagaagcctctgaggccttgctgaggggtcttccctcctgcagtgggcgtggccagggtggggggaggaattttgtctgactcagtctcctcagtactgtgaacaagggagggagagggacaaaggaggctgttaccagccactttaagaaataaagaacagccatattgaaatgcagtgtgtagcggcaaagtctgtagaagtgaacgcgctcccctttaccagacgctggagcatagctgtgcctgctcactagcttccgacgcgtttcctttccttctagggattttttgaactgataccacaggatctcatcaagatatttgatgaaaatgagctagaggtaagaactatttctgcatgtgcttgggaatgtagttaatgagcgctgcaggccatgagttcagtccttagcaccactggtgtggggtagaggggatggccatttgtggaagggatgagggaggggcttccttagcgtgtgaagccctgggccccgtcctcagacaccgtagaacgggtgtggtggtgcacacctgttacccagctcttgggaggtggaagcaagaagaccaatagttcttgtcatccagagctacactgtttgaagctaacctgggctacagggaccctgtctttaaaaagagaactggagggctgacaagatggctcagtgggaaaagtagaccaccaagcctgacagcctgaatttggctcctggagtggacatggacccccaatgagttgtcctctaactttctcactcagaacatgacatacacatgctgatgttgccatacatacatacatacatacatacagtttgatagatagatagatagatagatagatagatagataaggaaagagaaatgctctatggttttgttttttttaagatatattttatgtatatgagtacactgttgctgtcttcagacacagcagaagagggcatcagattccattagagatggttgtgagccatcatgagattgctgagaattgaactcaggacctctggaagagcaatcagtgctcttaacagctgagccatctctctagccctaaatgctctatgttaaaacagctttggctggatgtcccagcactgagggacagaggcagtgaaccgctgtgagtttgaggccagcctgatctatataatgagttccagaggtacataataagaccctgtctcgggaaggagaaaacagcagagcttcgccctggttttcctgcttaccattctgactgccgatccgtgtatctgtctgcagcttctcatgtgtggtctgggagatgtggatgtgaacgactggcgggaacacacaaaatacaaaaatggctacagcatgaaccaccaggtcatccactggttctggaaggtaatctaagacatgtactcagtcgtgctatgcctctgagtgtgagtccacccttgccaatagccatgggtaagcagggagagcattcagggtgcactgagatgggcacattagctttcaccaatgtgggaacactcttagaatgtgaggtaaccggcaacatggctcctctaaatgcttacagctatgcctttcagtaataccaatatatgcaactgtcaaaggtttttgttttgggggagggagggagggagagagagaagagagagaatgcttgcatggatttgtgtcaatgcgtgcaatagttgtagaagccaagagggagcaaggttccactggaagcacagttacagacggttgtgagccaactgtagatgctggggactgaatccaggccatgcaagagcattcttaactgctgagccatctctccattgctgagagaaaagtcttagaaataggatttgtttgtctttgtttttttgagaacaagaacaaactttagtgattattctctaaatgctaatcactttttgagttctctgtacaagactacacagagaaaccttgtctcgaacaaaatcaaaataaaaaaaaaaaaagagttctctgtatagctttgactatcctgtatcctctgtagaccatgctggctttgaactcagagatccacatgccgccaccactgcctccaggggctctaatggctttcccagggcagtttgttattttcagtactcttgtcactcttgtctagcagaagtctttctctttttcaggctgtttggatgatggattcggaaaaaagaatacgcttacttcagtttgtcactggcacatcccgtgtgccgatgaatgggtttgctgaactctatggtaagggtcctgtgcagagctctcagaagtatgcacacaccgactgtcattgtcatagctcaggcgtcttcaggcttccactttagtttaatttttaaacaactaagttataggcttgggagacaacatgatggtaaagtgccaacctagactacctggcaaactgcaggtaggtaagaggctctgtcccaaaaagagaagtggaggtgctgctaccttctcattggacagtgacagaaactggcacatggttgagttactttccgtcttgggcattaagctgcgttctctgtgctgtggtcctagaaacccagcacctccagcccagctctgcctttccaagcttcctcacgctgcagccctctgaggctcctcctgtcatgctcactcttttgttgctacttcataattgtaattttgctactatcatgagtcataatataaatgcctatgttttctagttgtcttaggtgacctctataatggggtcattcagtcccctccagggtgaaaacccacaggttgagaaccactactctcactgctgggtggagagagcagggaaatagcgttagctgacatctatgcagtgagtgtagagaatacaccttagaggattcgcagactacactaaagaaaggtaaattctcctcttacccaaggattcaccttccgctacttcaactaccacagtcattcagtccagaaatattaaaggcattttaataaacagcagagagcatacttacatgcctacatgtgagatgtgcatgcaaagaccaggttcatcactattcactattttaggcgtccacaggggacttgaaacattctctccacaggttaggaagaactcaacaatatcttaggaacttgtatgtaaaaaataaagttaaattaaaagtaagtttttccaagctttgttgatagacaatcttttttgtggtttggtgtgagctgtggagtatagagactctccgaagggtctttattcttttttcttttttgggggcgggggtagtttgggtttttggtttttggagacagagtttctctgtgtagcgctggctgtcctgaatctcacctcactctgtagaccagtctgtcctggaactcagaaatccgcctgcctctgcttcccaagtgctgggattaaaggcgtgcaccaccactgcccagcagggtttttattcttgtggaagatggtgggaccccagataagatcacacatagctccccctctactttattttattttattttatgttatgttatgtgtaatggtgtttgtgcaccgtgtgcttgcctgtggaggccagaagagcatgtcagatcccctagtgctacagggaggtcgtgagccacccagtgtggctgctaggagcctaactcctgtcccctgcaagtgtgggctctaaacagctgagctctctccagccctggtactgaaagtcgtagctgtgatctgatcatgaaggacaaatatagaaattatgcctctgagaaaccctctggcagccatgcatgcacatttggaagtgattatgggatttaaggagaagagtggaaagaaagtctcagatcaggttgtgagcttggttatctggcgcttggggtgttgaggattggagagagctaagtggaatctctgaaagaaaaaggcggtttctaaaatgtccgtaatgagaaaaactgtagactgtgtaacagggtcacatgcacataagatgctctaaactcgcattctcaacctgtggaccgcgaccctaggaggctcacatactggatatatgcattacagtgtaaaccactagcaaaattacagttacgaagtatcagtgaaataattgtatggttgggggtcagcacagcatggcaggctgtgaaaggaggggggaagctgcccagaaggactcgggaatcccaggacttgggaatctgaagtacacaggttgacagtactttgaggccagcctcagctatattgtgagttccagcacagcctggactaagagtaaaacccagtcttgaacatcagacaaccaagccttgccgccaagcttgacggccttagttaaatccccagggcccacaagtggagagagaactcccacagcttgttgcctgacctccacacatggacactaaggtacagaggaaataatagtgaataagtataatttaaatgttttaaaagctaaaagcttttactgtggttccgtagtgctttcatggcatgtaggaggccctaaattcaacattgaaaaacaaatcaaacaaaagaaaaccccacagaaaccacacaaaacccttcccagggttacctcatgagctaagattgtcatgactttcacatccttcagctgtgttttattctgttattttcagtttttacagtgacattacataatcagggaaaaattaaaactggtccagtgggaatctaaagcagaaaggaagtcctccctccctgtaccggtgaagaaagtcctaattcaagatgcaactgggtcaggtctaggaaaaagccgagtgtctcaggtgtgccacggtgggcagaaagggctcagcgccctcaggtgaagggacagactgtgctggacgactcagcagtgactcctcacactggggaggcttctctgtctcttctgagtcgttttctgtgtgtgcgagttatatatggagaagtatgttttgaaatgtctacggacttgtgggtaaagcaaattaaaccacagaaactcatcttccccacaggctcgaatggaccacaatccttcacagtggaacaatggggcacccctgataagctgccaagagcacacacctggtgagtagctgttttaccctagacagggcatagtttctccctgctagtgcagccccagctgtgccctcttgtaataggtgtgtggcagccttagaagacaggaaggacagaaactcggatccagaaacccatcctgcttgggctcaaaattcaggcagctaaagatagagatgctctgggctggagggtttgctcagcagttaaaagcactgactgttcctgtgttcagttcccagcaaccacatggttactcacaaccatctgtaatggaatccaatattctcttctggtgtgtctgaagacagctatactcatacataaaataaataaatcttaaaaaaaattaggcccaactaaactgttggccatatatatatccctgttccatgagtaatgtggtcttttccccagagtgccagaatattctatcttgatggctaacatagtcaaggaacgcagttatctggagagggatgtaaggacgagactgcaccagaggtcgggagacttccctggctgttgtgacctctaatagcaatgatggaacatgctcttgaccaagtagcagtgggactatggttaccatggtgacatttcctccctctctgtcactctaaccagatcctctcaatcttttcagcttcaatcgcctggacctgccaccctacgaatcctttgacgaactctgggataaacttcagatggcaattgagaacacacagggctttgatggcgttgattagattacaaaaaaaaacaagctgtggtgtcttgtacaccatagtttctaagcaaaagcaaaaacaaaatcacattttaacattttccagatagtttctaaaagatggtcactggctcttcccaccgagaccagaggacagtttatccatgatttagccaccaccatgctgacctgttcacttgtccagttactttgtccagttgttggggttcatgtgtacggcaggatgtgagtcctgtacgcctgagttctgaccctatctcatcttgctaggcacatccttctgaaactactgagattccaactgtgaaatatctgtaatgagtagctggtgggaaaaatttgatgctttttaaagatgaaatttggacaaagaaagtctttaatgattagtatactgcgacatacttagtaccacatgtcgctacttattctgtagacctgcctagtgtaccttatcgcctagaaccttgaagccgctttggaagatgtatcacacgtgtttttagtcacttaagtcactagtgtttaaaaaaaaaatgtactcttcacttgggaagtatttcacgtttgttagcatgcagcttgagccttacaggcgattctggagacaagtggagcaagcttttattgcagtgtgtagtgagtcttaggcctcctttttgcctgtgcatcctaaggctagagtcattatgtgttagtgcgttagaattccttcaaacacgaaacaagctccacaacgcagtgtttctaagcatgccgtgaagaaccgagttccatgtatgacttgcccttaccagccactcttcacgcttgcagtcacgtagtacatacgtgtttacggagttcattatgtttacagattaagcgaatttctgtagttgcatttttatatttttagtatcacattagtataaaaatttgtttaaaataaccaaagagtagttcaatgcataatttgtatgaatttgttaccaagtttcttatgctttctaaaaaatactgtttcctatgaaaattatgtttaatcaaaagtcaagaacccttggggcaaaatgctacaggtggagtcccaccatagtcacctttgaggcacaggaagaggttccatgcatgaatctgcacacatgagcagtgctggctgctgtgcaccgggcccttgggatgaagccatcagcactgacatccagccccgtcttcatcctcaggcttagaaacaagtgggatggtgactttacagtcagtgggaagtaagagcccgcagaataacaaaggcagaaggacaggaaagcgaggtccgagtccgactgtgaggtcatatctgccaaggctccttctagtcagcttacactggtgattatacggaaaatgctcttagatatgagaaaagcaatgtggcatgtaatgagttagtgtaagcttgtgttataaactttccgaatgcttataagtagcctgtgggagctgtaagaaatacttagggccattgatttaagcttgttggctctaacatgactaatacctgtcagcccatggtagggatttcagtgacagtagtggaaacgctttccacagaccacaccactatgttgatcggtgaaagacacccccaggccagtgcatgcttccagagtgtcctgatcagtcagccaggcatggccaccgtccagtgttgatttttatcattagccagctgagcctgcagcacggggctcatttccccgtctggcagatgtggatagctgggcccactcattctgtctctcaaggctatggtaagttcttaaaggggtacttttctgcaagccaccagagtctgagtcagctgtcccctcccagtaagcatgttcacctaaagtgatttagcctaggcgaggaggatccctactacgtgctggattatgtgtgtgttcatgtaaggatttcagcgtcaaaagttcacttcctccatagtggcaaaataacactaatatgggctggtgtgttatctggagtgcccccattgtgtggaactaagggtgaaaacagaactgtacacggttgttcagtgtcgtccccagaactcatccccagcagggcttagaaaacacgagcttccttcctccttcacactcattttcctttggatgattcagtgacatcacagaacctggtgtccccctccctaccccaggtgtgtagtaatggtccgaagggaccctggctggaacaccacagccccccatgctagtgcatgaaaacatctcgttgatattctaccactggggcattgtggagtcacattcacgaaacacgaagaccttgtacttctctagaaaagtgttttagcctactttttctctaatccccaccccaacaaatgaaacacaaaattgcattacaaaagcaaacccaaatggtatttgttttcgattttatttataccgctcgagttattccttatacgtatcaagttaaactcaattggttttaatgataagctatttgacattgtttttaaattttttcttatatggtaaatgtatatccagattaaggtatcgaaatttattgcataaactataaaatcattttcaaaatctcaattccacaaataaagttctattctgattttaaaaacaaagctgtggctccgttacctaaaaatgtttgagagtctcaagacggcttggtgactgtgtgagtgccctccatgattacctgacagacagccgcactctggcctctaggctggcaagcatagaaggtgctttagcttaggactccctattggttttgggttacacagttctccctgtaataatgcctagttcctacatgtactatgcacacacccctctccagacagtgtaccaggaactatagagcccctggaatcctcccatgcactcactgggctacataaaagtgtgaggtgggaaaagtgaatatattacctagtctgtcaaccgaaatagggggtcacctgagctgcagctcctccttcctttagacctctgtagcctgggtccttgagtgttctcactcacgtagcctcctgttcctgttggtactgtctctgctcaaaaaaaaaaaaaaaaaaaaaatccaaaactttaaaaagccagcccctaggacagagagttggagagcttgatctagcctagctgggccagtgttggagagctcacactggtggtcctgatgcaagtgagctggcaagcagaacatctcagctactgcccaagcccaaggctctgtgttggcctttcccatctgtgaactgctgtagtacatgaaggagcctgtcctgaagatccaaagctatagattctccaggacacagggcaacagtaggatatccaagagaagtcctggtgaggctccggtattgatagtgtagcagaagccagaggccctaaaccagaccaatgactcaattaacatttgcaattgaagacgtatggacagagggatatactgtggcacacactgacagactgcagcttccatgatgatatggggtgggggggcggcgggtggcaggagagctgggacgctttgaggataatccctaccctctgcatcaaatgcggctgaggcgtgttacaggtttgccgttaagagtgttcattcacataatgttttcctactaggaattgcaaacttaaaacctttaccatattttgtcagaattcaggggagtcagtccctccatttctctgaccttgggttttccttttgaatgactgggcaggggagccgaatgggtgagcgactgctttcaggaatgaaataaagattgttagtgggaagcaaataaaacacagttaagtcgaaaagaagggcggtgggcggataagaaagaagagatgagtagggatggggagcatggtgtgaaattcacaacctatcaataaaacatttttaaaattttatcaggcctcactcgaccaccctctacccatgaccagtgctcagtgcttgcatttctaggaggactcactttcccactttttccatcccttttttgggctcagtgaccgcagcattggtatccactgtgaccagtcgctttatattaaccatcatttatttttgcacgaatttgggcagcttacagatggaaaaggctttgcatgcatcttttttttaatttttatttatacatctgtgtgtgtgtgtgtgtgtgtgtgtgtgtgtgtgtgtctgtctgtctgtctttggaggctagaggagagtgttgggtcacctgaaactggagttacaggtgcttatgagccattgggcaaatgaaactcaagccctctggaaaatcagccagtgctcttagccactgagcccatctttcctttccctaattcattctttctctctctctctctctctctctctctttctttttgagacaaggtttctctgtatagccctggctgtcctggaactcactttgtagaccaggctggcctcgaactcagaaatctgcctgcctctgcctcccaagtgctgggattaaaggcatgtgccaccacgcccggccagaaaaagacttctaattacttgtttaggcattgccaaggtaggtggctgtcttagttagggttttactgctgtgaacagacaccatgaccaaggcaagtcttataaagaacaacatttaattggggctggcttacaggtcagaggttcagtccattatcgtcaaggtgggaacatgtcaaagtccaggcaggcatggcacatgctgagctgagagttctacatcttcatctgaaggctgctagtggaagactgacttccaagcagctagggtgggggtcttaagcccactctcacagtgacacacctactacaacaaggccacaccgcttaatagagccaccgcctggtgggccaagcatatgcataccatcacagtatgtattagggacaaagaagacataatcaggctgggaagctgtactgagacctgcgtgagggcttactccaaaccgctgcagccctaaccaatagacatgtatgtaacgctctcctaatagctacgtccaaacaagtgaaacatagaacccagtgtatgcaacacaccacgttcatatataatccacatgcaattaatagagcagagtcttcacctgggaatatttggtcatcaaaatccagtgttgtcttacaccttaccatgtctccgttcagactggccacattccaaatagccatgtgctgttggtacctgtgtattcagcaagctttggcatcgatcagcaaggctggagcagtatatgagagaggcagctagaagctctgacactctggattcactttctctctccaactccaggaaagccagttgctgagaactaagctacgcgctatcgactgccgtgtcctgcagtctctgggctcacacctagaaggctcagaatggctgtctgcttccccagaagccctttcacttccctgatacggtttttactgttgacaacttgggtgacagacagactgatgcagcttatgaaggtgtcttggtcacggttctattgctgtgatgagacaccctgaccacagcacctcttcaaaaaggaagcatttaattagggactcgcttacagtttcaggggcttagtccattatcatcatgtcagagagcatggtggcaggcaggagacgtgctgacgaagtagctgagaactacagcctgatctgcaggcagacagacagacagacagactgactgactgactggaccacacttgggcctttgaaacctcaaagtccagcccataacacacttcctctaacaaggccataccaactcctaatctttttaatcttttcaaatggtctcactccctgataactaagcattcaaatacacgagtctataggggccgttctgatcgaaaccaccacagtagggaagagtgtgaatgttcaactcctgccagcatctgccagagtgcatgcgtgagaggagtaggggtatgagggacacctctctagggctgggggtgtgacttggtgctagcttgtcatgcagggaatcctcaatttcatcctcagaatcatatcagctgggtatgggtatggggaggcagaggcagaggcagaggcagaggcagaggcagaggcagaggcagaggcagaggcagaggcagagaggcaggagctttaaagttggagatcatccttctctctatagtaagtcttccccggggaaacaagccgattctgagagagagagagagagagagagagagagagagggagagggagagggagagggagagagggagagagagagagagagagagagatcaatccactgagctgaggttgtccccagtagccgagctgatggcatgctcagcacagttgggaggtgaatgggaaagagactgtgtatctgaaagagggccgagacaaaacagaaagactggcaaaagccactgtttgaggcaggagctcctggggactggggtagcaggggtcactgggaacaaacctcagacatgcaggggaaagcacaggctgtgggagagacagctatttgtttttttggctatgaggataataacaagatgcgaccagaccaggagggctaatggactgcagatgggcactggctgggaagtgggtccagctggaggctttgaactggaaccaactcgctcattttcagccgtgcgtgtggcctgtgaagtaaaacaaggggctcctcgcagataattatgagttactcccagcgggggggggggggggcggggggggaggagtggggattatccttagtgtgaaaaaagagaagcagatgattgtggtaacaggatcatctgtgcctccaccggtgatggccgaggtgggagctgatacctgagccaccagttcaccttttaggagactcttagtacccaggggcagcaggtatggagtcagaacttcctgttagggaggtgagatgtgcagatatcccaagttagacagaaggacctaccaggagacagggtccaagctgagccttagcttctctgcgttctctctctcccactctcttcttgccatttttttttctttgctttaagtaatgttgttgttgttgttgttttgagacagggtttctctgtgtaaccctggctgtcctggaattcactctgtaaaccaggctggcctccttgaactcagaaatccacctgcctctgcctcccaagtgccgccaccaccacctggcagctttaagtaattttatattcagttttgtttcctttttttgagacacagtttctctgtatagccctggctgtcctggaagtcactctgtagtctaggctggcctcaaactcacagagatccccctgcctctggcagctttaagtaattttatattcagttttgtttcctttttttgagacacagtttctctgtatagccctggctgtcctggaagtcactctgtagtctaggctggcctcaaacttacagagatccccctgcctctgcctcctgcatgctctggttaaaggtatgtgccaccactaccctgcttgcttgcttgcttttaagatttatttatttattttatgtatgtgagtatactgttgctgtcttcagacaaaccagaagagagcatcgggtctcattacagatggttgtgagccaccatgtggttgctgggaattgagctcaggacctcgagaagagcagtcagctgagccatctcttcacacacacatacacacacgcacacacacacacacacacacacacacacacacacacacacacacacaccaggttttctttcttaatgaggacatctcctgttcacatattccagactagtctcaaattccctatgtagccaaggatgaccttaaatcttgatcctcttgcctctaccttcccagtgctgggataacaaaggtatatcactaccctttgtttatggagaactggattcaagcccagggctttgagcatgtttcacaagcagcctaccaaatgagctacgtctccagccctgatccctgaacttccgacgggggcaacctttgcagatatcttatattcagtaggataatgtaaatgtttattggggaagattctaaatgtagctgggtttgtatttaaaaaattaattctctaaactggtagcattcatgagaccccgatttaaacccagcgccccataaaccaggcatagtgactcacactcaaaatctcagtccttgagatagatatagagacaggaggatcgcaggtggagccatcctgtgctatattacaaatgtgaggctagcctgggctgaatgaaaccatctctctttccttttcttatcttttcatttaaagccatgttttctcttcttttctagaacttgctctgcaagactagcctctaactccacagctaaatgagaccatttcttaagggagaaaaaaaagctggtggtggcggtggtggtggtggcggtggtggtggcagtgaagtgcttaaatcccagcactccagaggcagaaacaggcagatctctgtgatcaaggccagcatggtctacagagtgtgttccagaacagccaaggctatacagggaaaccctgtttttaaaaaaaacaagaaaaagaaaagaaaaggaaaggaaaggaaaggaaaggaaaggaaaggaaaggaaaggaaaggaaagaaaagaaggaaggaagaaagacagacagaaagaaagaaagatagtgggccagacatagtgacacaagcctttaattccagcacttagaaaggcagaactctgagagctacataatgagaccttgcctcagagggtggaaagggcaggggctgagaattaaattcatatttgaccagaattaaagcatccgactggattttaggttgtctctgccctgttgggtgttctaggatctgtaataatagactccctccgtgcacacattgtatacatttgggtctactgatggctggggttcacagtttcaactgtgctccaacactccctctgagggtgtttgagtttccctctcaagtcctgagcctcctggcagaggagaaccccaccttggtaccgctatcccctgggcctgagcctcccaggtaaaggcaattttttcttcctcatttaacatgtagggctagaaggctgtaagacgcctggcttgagaacttgggaagggggtactcagacacagccctagtacttccatgaggtgactaggtatacagagaaatcaaccaggccaagtggcccaggcagagaacacagtgagatgctctgagatccttgaggaagtagaacccagaaatgagttagtgtgaccgtacaaatgtaaatgcctcagatgggtaagatatgagacttagggtatatactagcacctgtttgctgatggctgatctgaatagaaaagaagtccctttattttcacgctgaaatcatgcaccaggaatgaagacaaaactcagttggcagagagctcaccttccgtgagccagaccctggcttccacctcacctgggtgtggtgatgcaaatctagcgctctgatggtagggaaagaaagatcaggagttcaaggtcaccctcagctacatgttgaattcatatgagcttggactacatgagacattgtcagaaaggggaagaaaagaagttataagccaaaggaaaaaaaagattcccagccccagatatacccatagtcaactattgttccagagcgggttacttagaaaagagacttttgctctgagttggaaaagagcccccaaggcctatgggagccatactgtagcctgtccactctgtcttggcgccagaagccagtcttgggccaggagagacagctaagacagagattgaggtctccagtgtgttctccacacaatacaagccactagactgcgtcatctgcttgagatctcccttagggcttctgcggaggagaagtatttcacaattcgacaccacaaaatgctcctgaatattgaattacccaaaagatgcttagtcttcgggt

SEQ ID NO: 1115 - DNA, 2334 bp, Mus musculus
atgagtggaatccttaccagcgtgcagacaaaaactatcaaaaagtctttgaatccaaaatggaatgaagaaatactgttcagggtccttccacagcgacaccgcattcttttcgaagtgtttgatgaaaatcgtttgacaagagatgatttcctaggtcaagtggatgtccctctctatcctttaccgactgaaaacccaagaatggagagaccatatacatttaaggattttgttcttcatccaagaagtcacaaatcaagagttaaaggttatctgagattaaaaatgacttatttacctaaaaatggctcagaagatgaaaatgcagaccaggctgaggagttagagcctggctgggttgttttggaccaaccagatgctgccactcatttgccgcatccaccagaaccctctcccctacctccaggatgggaagagaggcaggatgtccttggaaggacctactacgtaaaccatgaatctagaagaacacagtggaaaaggccaagccctgacgatgacctcacggatgaagacaatgatgatatgcagctgcaagcgcagcgagcattcaccaccaggcggcagatatcggaggatgtggatggccctgacaaccgggagtcccctgagaattgggaaatcgtacgagaagatgaaaacaccgagtatagtggtcaggctgtccagtcacctccatcgggtcacattgatgtgcagactcaccttgcagaagagtttaataccagacttgccgtgtgtggaaatccagccaccagccagccggttaccagctcaaatcattccagcagaggaggcagcttgcagacctgtatctttgaggaacagcctacacttcctgtgcttttgcctacttcatctggattgccaccaggttgggaagaaaaacaagatgacagaggaagatcatactatgtagaccacaactctaaaaccaccacatggtccaagcccaccatgcaggatgatccaagatcgaaaatccctgctcatctgagaggaaagactgactccaatgacctgggacccttacctccaggctgggaagaaagaacccacacagatgggcgagtcttcttcataaaccacaatataaagaagacccagtgggaagatcctcgcctgcagaacgtggcaatcactggaccagcagtgccctactccagagattacaagagaaagtacgagttcttcagaaggaagctcaagaagcagactgacattccaaacaaatttgaaatgaagcttcgccgcgcaaacattctggaggattcttaccggaggattatgggtgtgaagagagctgacttgctcaaggccagactctggattgagtttgatggtgaaaagggccttgactatggaggggttgccagagagtggttcttcctcatctcgaaggaaatgttcaacccttactacggcctgtttgaatattctgctacggataattacaccctacagataaatcctaactcgggcttgtgtaatgaagatcacctctcatacttcaagttcattggccgtgtggctgggatggcagtttatcatggcaagctgttggatgggtttttcatccgtccgttttacaagatgatgcttcagaaactgataacactgcacgacatggagtccgtggatagtgaatattacagttctctgcgatggattcttgaaaatgacccgacggagctggacctgagatttatcatagatgaagaactttttggacagacacatcagcacgaactgaaaaccggaggatcagagattgttgtcaccaataagaacaaaaaggagtatatctaccttgtaatacaatggcgatttgtgaaccgtatccagaagcaaatggcagcttttaaagagggattttttgaactgataccacaggatctcatcaagatatttgatgaaaatgagctagagcttctcatgtgtggtctgggagatgtggatgtgaacgactggcgggaacacacaaaatacaaaaatggctacagcatgaaccaccaggtcatccactggttctggaaggctgtttggatgatggattcggaaaaaagaatacgcttacttcagtttgtcactggcacatcccgtgtgccgatgaatgggtttgctgaactctatggctcgaatggaccacaatccttcacagtggaacaatggggcacccctgataagctgccaagagcacacacctgcttcaatcgcctggacctgccaccctacgaatcctttgacgaactctgggataaacttcagatggcaattgagaacacacagggctttgatggcgttgattag

SEQ ID NO: 1116 - protein, 773 aa, Mus musculus
MSGILTSVQTKTIKKSLNPKWNEEILFRVLPQRHRILFEVFDENRLTRDDFLGQVDVPLYPLPTENPRMERPYTFKDFVLHPRSHKSRVKGYLRLKMTYLPKNGSEDENADQAEELEPGWVVLDQPDAATHLPHPPEPSPLPPGWEERQDVLGRTYYVNHESRRTQWKRPSPDDDLTDEDNDDMQLQAQRAFTTRRQISEDVDGPDNRESPENWEIVREDENTEYSGQAVQSPPSGHIDVQTHLAEEFNTRLAVCGNPATSQPVTSSNHSSRGGSLQTCIFEEQPTLPVLLPTSSGLPPGWEEKQDDRGRSYYVDHNSKTTTWSKPTMQDDPRSKIPAHLRGKTDSNDLGPLPPGWEERTHTDGRVFFINHNIKKTQWEDPRLQNVAITGPAVPYSRDYKRKYEFFRRKLKKQTDIPNKFEMKLRRANIDSYRRIMGVKRADLLKARLWIEFDGEKGLDYGGVAREWFFLISKEMFNPYYGLFEYSATDNYTLQINPNSGLCNEDHLSYFKFIGRVAGMAVYHGKLLDGFFIRPFYKMMLQKLITLHDMESVDSEYYSSLRWINDPTELDLRFIIDEELFGQTHQHELKTGGSEIVVTNKNKKEYIYLVIQWRFVNRIQKQMAAFKEGFFELIPQDLIKIFDENELELLMCGLGDVDVNDWREHTKYKNGYSMNHQVIHWFWKAVWMMDSEKRIRLLQFVTGTSRVPMNGFAELYGSNGPQSFTVEQWGTPDKLPRAHTCFNRLDLPPYESFDELWDKLQMAIENTQGFDGVD

SEQ ID NO: 1117 - DNA, 186723 bp, Homo sapiens
catgaaaaacttaattttgtggacattacctttttttgtaatcagctactgtatgttttattttagatcttttgttttgggtgggttttctgctctggaggtatatgcattaacaaaacattttcctccttcatatatgcatgttaattagcaatgtaagcaatatttcctaccatacttcactcccaatatttttggagatgtttgtataaaatggaatttaaagttcacttatgattgtatatgaaccacagagaagcccatttattaataacaaacttttttaatagttaaatgtagaaggaaaaaataaaaatgggaaacattgtaaaaaaataaaaaaattaaaaaaaatgaagaggccgggcgcggtggctcacgcctgtaatcccagcactttgggaggccgaggcgggcggatcacgaggtcaggagatcgagaccatcccggctaaaacggtgaaaccccgtctctactaaaaatacaaaaaattagccgggcgtagtggcgggcgcctgtagtcccagctacttgggaggctgaggcaggagaatggcgtgaacccgggaggcggagcttgcagtgagccgagatcccgccactgcactccagcctgggcgacagagcaagactccgtctcaaaaaaaaaaaaaaaaaaatgaagaatgtttaaaattgctaacttataaggacagttctcttctaaagagggtgcattctgttataagaaagtcccttttgttctgctgaataccttgataggtttaggtatgcaaaatgagcctagagctaaatttgggattgaagagttgaattgttctgcagtttaaggaaagaagatattggagttcctggtatattcagtgagggaatggagggtggagaaaagaaaggaaaaggatgacaggaagctagggattatgtggggagaaatgggcagaaaaaaaataaacaacaaagaaaccctggttgtacacccctttaagaataagggtgttggctgggcgcggtagctcacgcctgtaatcccagcactttgggaggctgaggaggtggatcacaaggtcaagagatcgagaccattctggccaacatggtgaaaccccatttctactaaaaatacaaaaaattagctggatgtggtggcacacgcctgtagtcccagctgttgcccaggctggaaggcaacggcgtgatcttgactcactgcaacctccacctcctgggttcaagcgattctcctgcctcaccctcccgagtagctgggattacaggcatgtgccgccatgcccagctaattttgtatttttagtagagatggggtttcaccacgttggacagggtggtctcgaactcctgatctcaagtgattcacccaccttggcttcccaaagtgctgggattacaggcgtgagcactgtgcccagtgacagatagtgttttaaactcaaaaatatctgcctcaaactttgtgctgctataacagaatatctgttgggtaattttaaatggacagagatttgaactcctgggctcaagttatccacctcagcctcccaagtagctaagactataggcacgcaccaccatgcctggctaattaattttattaatttttttttttttttacagacagggttttgctatattgtccaagctggtctcaaactcctggcctcaagcagtcctcctgcttcaacctcccaaagtgctgggattacaggcatgagtcactacgcccagctgataattacctcttaaagatcccacctctcaacactgttgcactggggtttaaatttccaacacataaactttgggagacatattcaaaccatagcagaagttactttagttttggcctcagaaatgagtcagaagaaaaaggaagaattcacatgctacaaatttatagtaaaagttgcttacaaagtatttatctgctcttcagtttcttcaaccaaaagctaaacaagtttgtacaggtagacaagacctttagcttaatttataaacggcttcctgcaaagccctcaagccattttatcactcatcatctcttaaaaacaaaactggaatgttaatctatttttggtagaaaaagttggagaccattttatcaaatggcttagacatatgaagctgtatgtaacttaaaactacttatttgccgcagaaatattacatataaagaaagaagacaaaactacacacacacattacattacctatagaataatattgagcacttctaattgcttgccaacttctcttcttgatcttataaggagataatcttattttcattcacacatttgagtcattttaaataatagtgtagaaacaccagacctttagtaggaatccttatttataatgcttttactctacatgttaaaatagaatggaagaaatatcttaaatgtttaactaaaaatcacttttataggcagattctcttattcagaattaagaatagctagtgtatactcaggaggttgaggcaggaaaatcatttgaatcttggaggtagaggttgcagtgagctgagatcgcaccactgcactccagcctgggtgacagagtaagactgactctcaaaaaaaaaaaaaatagctagggtaaaagaacccacaaataatgtcttttcttctcctaggaaccatataaagcattttgcatttcaaattattatctttctttttttaataattcaggcaaatataatcagagaaattctaaatgctactcattttagctgaaagctcaagttattgtagaaaggcaacacttttgtaatattgatattttaacctctttttcattttaccactcaaaaattgctaataattgaaatggaatgttctttgtaagtttattttatatttgggagctaaaataaacaacagcatttgcttaaaggttttgaactatggcatattaatggtacagatatggtttatctattgcagaattgagtcatatgcaataagaaacagcataaaatccataaataagattttatgagggaaaaaatcagtgttacatatacatttttccccgtttctggcaaatataatctttcattcatataactgttgactggcttctatgtgtccaatgggaagataaatacagttcctatattcaaagaactcccagactaattcagggagagctgcaagacaatttaggtactgctgcataggaatcctagttcctactatggggtagaagggatgcttcttccaggagacacagcaagggtcccactgtactggaagctatgaccaccacttggtcatttttgagcttctcatgttagtggaccaatagacaaacatagtaattaccgtattggcagggaggtataggagctatggttgagttacacaagaaagacaagaaagcgtatgtttggaactcaggggatccaccgcatattttagtacttgcatgtccaatgacaattctaaatgggcaattactagaaccatgacccaataagttaaacacaactgacaaatcatacctcttggggaggaaaatctgagtccccaccaggcaataacctaaatttgctgaagtactggccaagaatgggaaaattgagagtgggtggtataggagagagataatgcatatcatttatgaccctgagaccagttacacagtagatgctgcagcttatcctagaaacccttgtctatcaagtcttttggagaggtaaatactggacacacctcaaagaccctacggcagaatggactaagtgtggggcagatctgcacatgtattagattcctcttgcactctgactcataccctctcaactaacctttactccagtccttgctgcagcaaccaaagatgtagagatgtaaccagacagcaactcattttagttgtttaatgtatatttcactttctgcccctgtgcctcactgccactgctgttggacatacctgtaggagccaattcagccattctatacacaaggaaatctgcaaatattaacatcctatgaaataacccctgtccaatagggaatggaaactaacgaataaatactcccttcttggtagaacaattctgaggtacattctatatgactcctgaagggtccttagtgatatcgagcccaaatcaggttaatcatgtaaaggaaactaaaaaatttacaaaatcactgcatgggtcttatgccattccttgttttactcttttcagtccctcactcatgtttcctaggctcagtcgcgttccgataaatgtttaataactgcctctccaggaaaataaaatgatcttggtttgtagtgtttgcctatttctgtgatataaatacaccataatttcaagctaccaacatgacatcaccaaatctgcagttggatagaggtgtacacaattgtaccttggatgccagtatgagttgagtccagcacactactgcttgggagtgtgtctcaaaaaaaattactgcatgcaaacatttgtctcagaagatatagggtgaaacaaaaaaagacaaaaagctaccagtctgagccaattaccagacaatgatgggtgtaccgacattagccatggataccaataagaagagaaaaaaaatcttaggtagaagaggaaagaatttcaattgtataacaaactggtgataggaagaagttgtaggaatgggcagggggtatgaattttagaatactcagaagtctctagcctttgcaactagatagacaataatgctatttccagagacacagaatacaggattataatgagttcattttgggatctatttagtttgagacttttttcatgataccaagaaagagacagttagtgggaaatacaggtctgaagcttaggtaagagataagggtgtggaagctatagcaaggtattgtgaaattttattgttgataactacttatattcctggaatatcctgccgcccttcctctggctccagtcagacagcagtgaggttttctgattactgccctcaggctagaactgttactacagaaatgaaaagagaaagataagtcaatgctcagcttataagttttaaaatagagctttgaaactcctggtagaaaaaaatatgttgacactgggtatgatggcacatgcctgtaatcccagcactttaggaggccaaggcaggcagatcacttgaggccaggtgttcaaaaccagcctagccaacatggtgaaacgctatctctactaaaaatagaaaaattagccaggcatggtggcacataccagtaatcccagctactcaggagactgaggcaagagaatcacctgaacccaggaggcagaggttacagtgagccaagatagcaccactgcactccaaacctgggattataggcgtaagccaccgtgcccagccataacaaatctctttatatatctgcatcctattggttctgtttctctagggaaccataatacagggtctttaatctgtcagtctggaacagttcctccaactttcttgacttctatgtccttgacacttttgaagattacagggcagatattttgtagtacgttccttaaattggatttgttttctcatgattagatccaagttatggaggaaaagcaatgggttgcaagattttggtttatcaaatgttcactttgatcatttgattaaggtggtatatttcagccttttaatctatgtaactaagtactttctggaaatatatgttgaaccctgtaaaaatctcatttttcattgaactttgaatgtactcatttattataatttatatctgtaatgaacacatggtaccagaattattcattggattataatctgttgctatcataatttattttagtgctcaagttaggccatctttggccagtgggagcttttttcaggttggttcctgtgtccttttattctgtctccatcattactttcattattttctgggataacaagatgtttcaggctcaacttttatttgccttgtcctagtcctggaatcagccatttttccaaggagccctggtttcttttagtaaaaagttaaaatatggatgcaagatatgctcattgcttttggggtgtcattgttcccaggccctcttagaatacaaatgtagaaaatatttgtgtgtgtgtgtgtgtgtgtgtgtgtgtgtgtgtgtatgcagcagaggtttacatctacatttatttatatactatatatatatgttaaaaacttttgagttcatatcaacaccaccaatttcattataacaacacaagactcattcaagttttctctttccattcttgtaacttcttcaacagtgactaatgtggttctcattatcattcatatattcacttattggatcacttgtctctacaagtaactaatttcccatttctgccatcaccagtccaccaagcaaacccttccttgaacacacctgggtcccactgccttgcacctggccgtctttctcactacctcccaccccttgtggggtgaggagggcattttaaaagatgaccatgatacctgaactctcttctttactccttcctctgccttgtaacctggaacatagacgtaatgattgaagcttgagccactctctggactatgaggataagggtcacacctacaaacatcagagcagtgagctgtgaagtgcctgaatttctgaccctttggcagagcaaactagccatattaaccctgccctgcccactgtctagacttttacatgacagccatataacatgaatctttaaatcttattagtttaggtaacagccaaatgtaattctacttgataaagatgtccacagctagaggccagcgggaacacagatacatctactaattccaggagggagtgatgagaacctttatcaccaagatgagggagcacaacagcctgttagaagtcagaatccagcttagcaaaaagagggtcaggcaagaccaatgaattgattgggactatgtattctactactggaggcagaaacttagttcatttcagaaaatcaaataaacatttcttgcactactgagctctggatctgagatgggctctatgaagaaagtagctgaaactatggtaatggcaatggcaatggatgaggtccagggagtttccagtggaagaaaaaatgaaccttaaaaatctcaaacattaactattagaaaggaagcagccaggggatattaagagtaagagagaattaaaggagaacttctgaacaagacttttttatatcccttagggaattaattaccaacattaaagtgcatttcgtatcattacctttcatattgttacattccacatccaattttgatcccagggggtgatattttaaaaactagaaacaatttctgcatcacagtgaaatctataggcagagttaaagaggtttacgtatacagactactagaaagtctagaccaggtttactggttttcattcatttcttgcttcttaatcagtttggaggctcatgtaaaggcagatttgaagggagaaaagactcaagaacaagagatagaaggggtgatgctattggaggttgctagaattgcctggattttggcttgggatgatccctagcacaggtatgaggcacagaatcaattgttatgcaccatgtcacattcttcacacgtgcctcacatggttatacacacactcaaaccaaatcaacatgaacctaattgaaggcagcctaggtagacaaaacgccttcatgagagttctgcgcagttgagtgatatgtagaggagttcttcattctaaacagctttctcagtggtggttggttattggaccaccagctgatatcaccatcccgatttgagcttcctttaatttcaggtgcccctcctagctgttgaccgggatacaataattactctagttcatcttgtattggtagctgtttaattcttcatgatttcatattcggaaagacagaataagaaatcatgagtcaaatcagtggtctttagaagtatcatcactaatacctattggatacatcaaatggccaatttgctttactttataatcccttggggatttactgatttttttttttttaattaccagttttaggctgtgtatacttctcatatattcattaaattttagtagcagtaacggaagctgtttttacacgtttgtaattgtgccctgaaatgacactgaattaacttaaattcaaatgacttaactaacttaaaattaaacataaaaatgtgtatcatgagagatgagggaaatattcgcaaaatagaagggcacacaatattttcagattattttattcttaacccacaaatcccacagatatgtgacaacttaaaaaacaaattaatgctctcatggctttttcgatttaggtaagccaacaattcctgaccattctgtaattttgtagtcatgtttgattaagtgccatctctttccccctaatacggataaaatctgaattgtgtattaacagaattttgatacatattatatgaatgaaatggatcctaccaatcataaagtacgacaattgaggtggagtcttgttctgtcgcccaggctggagtgcaacggcgcaatcttggctcactgtaacctcctcctcccaagctcaagcgattcccttgcctcagccacccaagcagctgggactccaggcgcccgccaccacgcccagctaatttttgtgtttttagtagagacagggttttactatgttggccaggttgggctcgaactcctgacctaaggtgattcaccgccttaggtttcccaaagtgctgggattacaggcgtgagccaccgcgcccggccaagtacgagaaaaatcttacgtaacaaaccagtaatatgggctatagccttgttcccacgtagcatcttaaactgttaaaaataaatcagagttattctgaaatcattgaggaaaataaaaattagattttgagattgcagaattctgcaaatttctgcaaatgtataaaaacaacatgatataaattgtggcctgggtgttcataattctccccagactcttttatggatgccttatttggtggaggtcttcctgtaattatggaattataaagcccatcagacaggaatattaaaaagcatgattattccataaccttattccacaggaggagttattccacaggaggagttattctacaggaggtcctagttcactttatttttccctcttcgtcactgccttctggtggtgctgcggatcaacgcccagctaaagcaggtttagagggtcagcctggagattggattgttactggtgggatttaaagatggacagaccataggacaacaaatagcttaggaactggcactgtttacaaatcctagggagagaatttcagatcccgagtccaagactgctgcgatccctccaggcctccccatttgctgccacgctcaggctttccctggcggtccccaggtccagcttcttatgggaatgacacccttaaccgacaagaaagcgctatgattttccgtttgggatttaagcggggattaagctcacggattcccaggcgtctagtcagaggccgaactctgggtcggatctcagcgagacttgttgctgaggaacactgcagcttggcttcccggcgcttcccggcgctccctggctccccggcgggcccgtcaaccacccacctcccgggaagggaccgagggcgcgccccgccacgcgcgctccccacgccatggtccccgccgcgcgcgctcatcccacccgagccccgccgcacgccctccccactccccgagccccgccacgcgcgcccccgcccagccccaggagcgcgcgccgccggccttttcccgccgcgctgccgggtgccgctagtgcccgctcgccgcgggaggcgctgctgtcgctgagggagcgcctcctcctcttcctccaactcttccccgcctcctcccgcttctcctcctcctcctccacagttgcctgccctgggcgggggcgagcgcgtccggtttgctggaagcgttcggaaatggcaacttgcgcggtggaggtgttcgggctcctggaggacgaggtgcggggaccgcggggctgcggggcgggcttcccttcgggttattcagcagccggacccggggaggtagcggcggcggccacgaccggaggctctgctgtcagcccctcctccctcggcgcgagcctggggagcgcgcgaggcgccgcggggactgtgggggcggctcggcgcgcgggcgctgggggctcgctggagggagcaagcttgtcgggtccacacccgccccttcccggagcggccgccgccttacttgtcagtttccttcaggaagtgttgaggagggggctaggcggtcggcgggggacccacatcaccgcgccagccccttcctgccacccccgccgggtgtgcggagctcccaggcgttgggagacggtcgcagcatccccgctgttgatttgcttgctctggcggaggccgggccgacttaactttacggacttcggtctggagagttccaagtgaattgtcattcgctggtttgtttttttcttctttatctgaaatcctttttaatcccctaactagagacagggatgggagagcaggaacataaattttcctcctcctctttagcaacaagtgtctagtgtgagaagttcatgctttatttcaccggtcgtcgttgatgttaaaaagtgaagccaaaaaagtataaatactttataaagaagttaccacatctgttccctttgaaaactagattaagctctgggatttgaagaaggcaaagctgtttcttttcagctaaataactaatgctgattatgcctatgcttattaaaaatattgtacgaccatttggaaaggttgttccgtcgtaaatgatatgtggcttctgtgtgttcttggagattgtctcaaaaatgcaaatgggtgggagatgaaaaggctgcatgtagtctaacagtgactggttccgagtgaaaaaaatcaaattttttgctttcttgttggctgactaagctgccacatgtaccttttatcaagatgagacccagttaactgaaaatccatcaacctaatttatactgcttgcttaagtattgtaatatttaagttgtatagttccttctcttagtaccttggtgtcgtcaaacattttacacttctcttgagagttctttgtttataaagggtgggcaatttgttaatgcagttatttcaggatattttgagaatgcttacgtgatgcgattagaatttaatttcctagctattgctgccagaagagaaataaagtgatgatggacaaatggtggcggctcatagtccctcagaaacaatagtcaatgtgttacagctaaagatatcattctagctaatggcacctttattctgtagacgagatcagaagataatacagcacttcacctgtggtcgctttcttatcagtcagatttccctgcttgctacgtagactgcccagtgcagttgacttcaaggtggtgtccaacccaatcaggctgaccttggactttctttccctgctatattcacaggtaggccctgctaattgcagatttctcatctcaccgccttccagcagagccagttgatcttaaagaaaatagtgccaaaggtatcattcaccatctgttttctccctcttggtacatgatcagtgtttttaattatctactttagtaatttctctgttttcaatcatcacccctctgcccagctgaaataaaactaattgtggcagttaatgggtggtcggtaaggaactggggccaaaggccagaaactccaccctttgaaatgtggatttcctgaacttgctgaaggatttgtacttctaggaagtttcatggactgtggcctatcccattcacattctgggagttctggctgtcagttccatgactctaatttgcttctgtccccgctctattttgtccacattgaggaagggagtgagataggaagataagagacatgatgatgaagagtcttccacttcttccattgtaattggattattcattcaacagacattcatttactgtttgctctgtaccatgcattgtgctaggcaccagggatagagagggaaaaaagacagtctcagcctcggactgagggaaagataaaagtcactttttttcttgtggaggttgccctctccactatcatttgccatttattttctggtctatcacaaaagtaaaagaaggattgaaaccacactcccccatcctccccacccccaaacaccccttttgttaaaggaagaaagcattgcagctatgtcacttctaaaactcacagactagtctggaaataggcagccctctgctgttgattaaaagtaaagtgctttttcattacaacaaaaggagaggattcttattttaaatttgaaactaaaacagggagaaaaataatttgaaatgggatagaagatagtgaaagaattgtaatttaatcagtatatagtgaatagtcgctgagtcagtgtctgagcatattagcactgaagtatgctaaaatgtagatcataatacctttctctcacttttcagtgagttttggctcttcttccacatataagtgacttatagtaagagatcaccctggctgcatgtgcaggattttacctttaaagtgttaacaaacaaaggaggaagtgtagtataatttataccagatttgctctggtcacttgagattcacagtagagaataacatgcactgatctttattggagagcagtgtggtggatgcggggactggaattgagcatcacttcccacctccttcccatgcacctccctgtgatatggaggtgggaaaactaaacactgtttcccacactccattgaaattaatggactggatccaaagtaggctccccagttaagtgcacttacttgagatttgcagagtggaaatgaggtggagcatattgttttgtttctttggctttttctgctgataagcacagtcatgtaaacatctaaattttctgcgaaagtattccagtatctggtaacttgctttgtacatattgataggaagtcaccgaagtagtggtggtagtggcttccagacgtcaagattgattatattcttgaagtcatcagttctggtgatgactcctgatcatctacctttctgactgggagaggtagtagcttcctggatgggtcagttctgccatgtttctgatcttctagaactgcagtccccaactgttttggcaccagggaccggtttcatggaagatagtttttccatggaccggggatgcggtccagtggtttcaggatgattcaagcacattacatgtatggtgcactctacttctattattattacattgtgatatgtaatgaagtaattatacagctcaccgtaatgtagaattagtgggagccctgagcttgttttcctgcaactagatggtcccaagtgtgggtgacggtaatgggagacagggagacagtgacaaatcatcaggcattagattcttataaggggtacacaacctagatcgcttgcatggacagttcacaatagggttcatgctcttatgagaatctaatgccgctgctgatctgacaggcagcagagctccggaggtaatgtgatcggtgaggagtggctgtaaatacagatgaagctttgctcactggcctgccactcacctcctgctgtgtggctggttcctaaggttggggacccctgctctagaagtccagcctagcacctactcttccagctcttccaaaaattttgtaagcatctaatcccctgtattagcttctttcttcttaaagcatctagaatgatttctgtttcctataagaaaggctgactgaagcaaggaaaagaaggaaggaaataaagaggaaagagttcagagtctccgctatcggtatggagagtgcagtttgcacatacagaataatagatgcccctggtggcagcagccacaacagtgcataagtagcagggtaagaagggcatattctgatacttctggacccactaaggctgagcagaaactgacccttactcagtctgggaacaaacttcccaaacctttatgtactacacacaaaggaggagaagcataggttaagcagcagctgtattagtaatttctcccaatctttcatgtattgtttttgccattagtgcttttttgcaactctttaattccaggatcattgtaaagtatttttcatggagcagggactaaagaagtgaataaatatagtgtatttttaaaataatttatttttaaattatgtatttacttttgagacggagtcttgctctgtcacacaggctggagtgcaatggcgtgatctcagctcactgcaccctctgcctaccaggttccagcgattttcctgcatcaccctccagggtagctgggattataggcacgcaccaccacgcccagctaatttttgtatttttggtagagatggggttttaccatgttggccaggctggtctcgaactcctgacctcagatgatccgcctgcctcggccttccaaagtgctgggattataggcgtgaggcaccgcgcccgtcctattttaaaattattttaaaccatcagaaaagttgaaagtacaacacaaagagctccagtattcttctcatacagattctgcaactgttaaccttttcactgcaattgttccatcacctttttttgccattttcattaatctttttctgaaccacttgagagcaagctgcagacacaatgccccatcatctttaaatactctagtgtgtatttttctaaaacaagaatactttcctgcataacaaccatacccccttccaagctaggaaatggacactgatacaacaatgccattcaatccacagataccatccaaattttgataaatgttactaataatttctctttttccttttctggtctaagaacctatctgggaacatatattgcttttacgtggcatgtctttgcagtctcttctaatctgtaacatttcctcagtttttctttttttttttttttttttaatttttttttttattatactctaagttttagtgtacatgtgcacattgcgcaggttagttacatatgtatacatgtgccatgctggtgtgctgcacccactaacgtgtcatctagcattaggtatatctcccaatgctatccctcccccctcccccgaccccaccacagtccccagagtgtgatattccccttcctgtgtccaagtgatctcattgttcaattcccacctatgagtgagaatatgcggtgtttggttttttgttcttgcgatagtttactgagaatgatggtttccaatttcatccatgtccctacaaaggacatgaactcatcattttttatggctgcatagtattccatggtgtatatgtgccacattttcttaatccagtctatcattgttggacatttgggttggttccaagtctttgctattgtgaatagtgccgcaataaacatacgtgtgcaatgactttcttcacagaattggaaaaaactactttaaagttcatatggaaccaaaaaagagcccgcatcgccaagtcaatcctaagccaaaagaacaaagctggaggcatcacactacctgacttcaaactatactacaaggctacagtaaccaaaacagcatggtactggtaccaaaacagagatatagatcaatggaacagaacagagccctcagaaataatgccacatatctacaactatctgatctttgacaaacctgagaaaaacaagcaatggggaaaggattccctatttaataaatggtgctgggaaaactggctagccatatgtagaaagctgaaactggatcccttccttacaccttatacaaaaatcaattcaagatggattaaagatttaaacgttagacctaaaaccataaaaaccctagaagaaaacctaggcattaccattcaggacataggcgtgggcaaggacttcatgtccaaaacaccaaaagcaatggcaacaaaagccaaaattgacaaatgggatctaattaaactaaagagcttctgcacagcaaaagaaactaccatcagagtgaacaggcaacctacaacatgggagaaaattttcgcaacctactcatctgacaaagggctaatatccagaatctacaatgaactcaaacaaatttacaagaaaaaaacaaacaaccccatcaaaaagtgggcgaaggacatgaacagacacttctcaaaagaagacatttatgcagccaaaaaacacatgaagaaatgctcatcatcactggccatcagagaaatgcaaatcaaaaccactatgagatatcatctcacaccagttagaatggcaatcattaaaaagtcaggaaacaacaggtgctggagaggatgtggagaaataggaacacttttacactgttggtgggactgtaaactagttcaaccattgtggaagtcagtgtggcgattcctcagggatctagaactagaaataccatttgacccagccatcccattactgggtatatacccaaaggactataaatcatgctgctataaagacacatgcacagtttttcttatcctagacagttttaagaaggacaggccttggccgggcgcggtggctcacgcctgtaatcccagcactttgggaggccgagacgggtggatcacgaggtcgggagattgagactatcctggctaacatggtgaaaccccatctccactaaaaatacaaaaaaaaaaaattagccgggtgtggtggtgggtgcctgtagtcccagctactcgggaggctgaggccggagaatggcgtgaacctgggaggcagagcttgcaatgagtcaagatcatgccactgcactccagcctcggcgacggagcgagactccgtctcacaaaaaaaaaaaaaaaaaaaaaaaaagcaaggacaggccttacatcctacgatgtttctcattttgggtctgtttgggtctgtttagtgtttcttgatgaccatgttcaggtcacgctctcttggcaggaatcatagaaatgatgctgtgttcttcgcatgcatcacaccaggggacacatgatgctgacttgtcccaacactgtcagtgaccttaatcacttggtcaccttggtgtctgccaggtttcttctctgtaatgtcaccttttttctctttataattgatagtattttcaggggacatatcgtaagattatgccaatatcctatttctcgtcaagtcttcatcctcagttttagcatccattgatgaattctatctgaaccaaacaccactattttgttttatttccatctctgttagttggcattctatgtaagaagagctttccttttcctgtcatttatttatatcagcatagacttgtaaaatcccactttattcagcaggttgtaatcagttactgtcattaaatattttattgctcatactgtcccagtttgtccagtgggagccctttcaaggaggttcctaggtcttcgtaacaagtccccatcattctttgaacactttctggcagaagttgttccaggcttctcttgtattttgcttggctcagctatctacaatcagccattttccctagaagcactggtcctatttagtataaaatggtttttacatgctacaatttgggtacttggtgtgctcattgttactgggatatactcttggaccatctctgaacagttaagcgtgtgtgtgtgtgtgtgtgtgtgtgtgtgtatgtgtactctacacacatatataagtatacacaaagatctatagctatttctatatcaatctgtaaatacataaatttaaaaatcatgaattcatactgattttttccaattcaaacctaatacctgagttcctttatagccataagtaccttttctaacagtgaaaaaatttgacttttattatccttaatatatttgttcattgacttatgtgttcagtgtaactaacttcctgaccacgcagacatctcctctgccacttcagctcttcacatccttggatgccagtgggaatattgctattctctatgcagcatccctgtgcaacgccgtcctcccctcctcagtacccttgccagtgggcacccttctgatgcatctctgtatggtatctccctcctcccctcagtgccccgtgctggcgagcatgccaaccatgcacctctgtgaaattcaccctcactccacagacattttctgtagtggcctgtgattgactgctctgcgccaggaacagaaaaggagaaggaactataatttcttttataggtaattaggaattcatatatcacataggagtagaatctttgagctggaagagaccttgtaaataaatcatttagggtgagcaggggtatagaaaatgggattcttttgtgttggaattctggccctgtcacttacttggtgaatcttgcataattaaacatcagtcagagcaggatatttaagtctgctgattctcccatccccttgctgtctcagaaatattctatagcatttggagacatgcaggaaccagttgaacacaattgcttctcaatctatcatggttatctactccagagctgaatctttaagtcagatagctgatttgaattgctgaacccattgttctgctgaattctgtggcaattgatgttacttcttctttaggacttctatttcttctggcctccttgccaatagtatcaaagtttaagaggataaatgaatggggaggggataggagaagtctggagataaatgcagggagaaaggcacagcacaaacaaaaagcattttgataaggcttttctgaaagttgagtaaatatgtctgtagcccattattataactcatggctggactcaaatgtctggcttcaactgatgcgagacatgttggggcaatgaagagagtaatatgaacaaacaatcatggccgtcaataaagatgctttagtgaaagtattctcctttgggaaaaagagtcaacctaaataaatagcaactgcctttaactgaatacccactctgtgccaggcaccaggttagattttttcatactttagctgtaatcatcacaacattattgcagaagtaggaagtattacccccattttagagataaggaatatgagattctgatttgttcaagaaccttctcccagtagggagaagtgttatattcataacaaacacttggtccttccactttcctgctactaatacgcaaataaaataatttaacagaagagactttttctcaggaatatgatgaatgtgaatggaatgtgtgcaaaattaacttgtaattgttatgctctcatttccacatcttctgtcttttcttgataaagcttttaggtggacctctgaagtacttgatttctgtatttgcttaacaaatatttgatgaacactatgtatcaggcacgtgggtcagggcatgaggtataatgatatagaatatactttaccgattttatagccaagagggagagagaaacattaaataaattatcacacatcaatattttataagtgttattaaggaaaacagtgtaagatgaaagtatttataacaggctgggcgcagtggctcacacctgtaatcccagcactttcggaggctgagatgggtggatcacttgaggtcaggagttcgagaccagcctggccaacatggtgaaaccctgtctctaccaaaaatacaaaaattagccaggcatggtagcatatacctgtagtctcaggtacttgagaggctgaggcaggaaaattgtttgaatcgggaggtgggggttgcagtgaaccgagactgcgccactgcactccagtctgggcaacagaagaacactctgtctcaaaaaaaaaaaaaaaagtatatctaaaaattaattaattttatatggtgtggagaagggagaaaatatcaaggaaattgaaactaaggatgaataggagttagcaggtgaagagtggggcaatagaaccccattgagtaaatagaaccacatgtgcaaaagatgggatggagacgaacaggaaggttggagtgctaaaacaagaggcacaacgtcagcagatgaggctggagaggatagcctgatcaggcaagcctggcatgccgtgttaaggatttggaattgtataccaagtagcatggaaatcaaatgcacgcacgcgcgcgcacgcacacacacacacaccattgtcgtcatcatcaacattatttttcatagttaatatttgttcctcatatgcttaacatttgtttgctagttatttctttatttcttcttgcttcttcacctttccatctaggatcactttttctgcctaaaatatatcacctagaatttttttttttaagagatggagtttcactcttgttgcccaggctgaagtgcaatggcgcaatctcggttcactgcaacctctgccttctgggttcaagtgattctcctccctcagcctcccgagtagctgggattacaggcgccagtcaccatgccttgctaatttttgtatttttagtagagacggggtttcaccatgttggccaggctggtctcgaactcctgacctcaggtgatccacctaccttggcctcccaaagtgctgggattacaggtgtgagccaccacccccagccctagaatttattttactgactgtttgttggaattgaactttctcagtttttgtttttgtctgaaaatgtattgattttgccttcttttatggaatgggggtggggaagagtgaaatttacaaagagtgaaatgcacagattataaatgtataatttgatgattttcaacatgtaaagccaatgacccaattatgatacagaatattcccatcattccagaatgctcccttgggccctcttccagtcaattctgcccgtctactctctataggcagccttttgtcaccatggattacttttgtctgttctagaacttcatgtaaatggaatgtacattatgtactcttttgtgtcttgattctttttttgagagtcatccatggggttgtttgtatcaatagctcattctttttcttggtgaatagtatttcgttgtatgaatatatccattctccttcgatggacacattgattgtttccaactttgggctattatgaataaacctacggtgaacattcatctataaatcttttcataaaagtatatttttatttctcttgtgtaaatacctaggaatggaatttctgggtcatagggttatatgtgtttaactttataagaaactgcctaacagtctcccaacacgattgtaccattttaatctcccattggtaatatgtgaaagttctagttgctgcacattgtttcagcaacatttgaagtttcagccaaagccctcctcctactcctgtctcccagccttctctagtaacctaggttatcagctccatctgtatccttccagtgatactttgtgtataaaaaacagatatggtgttatcacacttaaaagtagtgataagatgtaaagtaatgatgagttgttctttcttagaaattatatagtattgattgaataaagtctagtattttaaatgaggaatacttccataaccacgttaactgcagcagttttctttcctacccccatgttctgtacctgtggttgtcaactttagtgtccatctgaatcatctgaagagttgttaaaatacagactaccccacagtgtgtgattcagtaggtgcaggcctcaacatttgcatatgtaacaaatttccatgtgatgttcatactgctagtccatggaatccactttgagaactactgcttgctcctaaatccaaggattctggatatttcttctttattatggttattactgtcaaaaactcttgaagaattctgactcatgcatgtgggtatcatagactccagctttacaaggacacttctaattgattttatttctcagttatgggtgatcttccacttatatttttatagatcgtttcaaataaatttacataccagaggaagaaaactgctgtcaatccataggttccagtgtttagtttggaaaatacggtcaccgtaagtgatgtagcatgttgctcaaaagaaaaaaaaaggaggccgggcgtggtggctcacacctgtaatcccagcactttgggaggctgaggcgggtggatcacctgaggtcaggagttccagaccagcctggccaacatggtggtgaggtgatatatgagaatcccacatatgtctctactaaaaatacaagaattagctgtgtgtggtggtgggcacctgtagtctcagctactcaggaggctgaggcaggagaattgcttgaacctgggaggtagacattgcgagcagtgagccgagatcataccactgcactccagcctgggcgacagaggtgagactccgtctcaaaaaaaaaaaaaaggaaaaaatatgcatccctccctagcaatttttttttgttgaatattttgtttttaccttattaccctatataaatacagtattattcacatctgaatcactatattatgtttataattatttatttcacattttttgtttggtttagttttctgtatgtctgtcacaaatttaattgcaagctgttggacagagctttaaaaccattcagtgcggtaaaaatgtaacacacacacacacacacacacccctacacacacactaaaaatgaatgctagccatttccttttccttgttcttgttgaagacagcctcttgctatgttgcattccatctggactgtttgttctgtacacctgttgtgtagccatcatctgtgggcttccatttgccatcattgtgagaattcactcgatctcttttctgtgttgaatctactgtttctttaatttcttgttttcttctttccaaatttattcctttgtttggtggcttacatcctctgtacgaggggcgggtactgttgactggagcctctcacagtagaatgatctgaacctaccatttcactgtgggattctcacatatcaggatttatagcatttttttttcccttggatcacccagttcgctcaatcttctgtttagtgggtacagcagccgctgttctcagacccaagttgggggatgaggcttctattttcagctactttagaaaggtttcttgttaatccagaatttgtcagcccctactgtgcgccaagtattctgtttgtttctacagaggggtataaagttaatgaaaagatggccaggtgcagtggctcacgcctgaaatcccagcactgtgggaggccaaaggcaggcagatcacctgaggtcaggcgttcaagatcagcctggccaacgtggcaaagctaaaaatacaaaaattagctgggcatagtggcacgcgcctgtaatcccagctacttgggaggctgaggtaggagaatcacttgagcctaggaggctgaggtaggagaatcacttgagcctaggaggcagaggttgcagtgagccgagattgcgccactgcactccaatctgggcgacaaagcgagactccatctcaaaaaaaaaaagtaataattataattataaaagttaatgaaaagaaagtttccaaaatctcagttttaaaagtggagaaaggcataaagtttattgcctcagatacaagatagtatgtgataaatgctacataaatgagcctctgacaatgagaagattaatttcatctaaggcttttagaaaagatggcatttgggctttgaagaaaggacagaactttctttaaagaaaaaatagaatgtaaaatttacaaaatgtttaagaagtaaaaactttcgccgggcgcggtggctcacgcctgtaatcccagcactttgggaggccgaggcgggtggatcatgaggtcaggagatcgagaccatcctggctaacaaggtgaaaccccgtctctactaaaaatacaaaaaattagccgggcgcggtggcgggcgcctgtagtcccagctactcgggaggctgaggcaggagaatggcgtgaacccgggaagcggagcttgcagtgagccgagattgcgccactgcagtccgcagtccggcctgggcgacagagcgagactccgtctcaaaaaaaaaaaaaaaaaaaaaaaaagaggtaaaaactttcatgatcttattactttaataactttatttttgcatatttccttctaatctttctgtgtgtgcttttacagttgtcatagatttcagcattcttattttttcaattaatataattattctgttataataataattactttttgaatggcttcaaaggattctgcctagatgatataggattttaatagtgaactagtaagggaatccagcttgtataaaaactcagagataagtaaaaatggggtatatatatatatttttaaaaatagacttactagggtgggggacaacagaggaatgggagaaggatgaagaataacaaaagataaaatctctcaagacttgtgagaaatggaaagacgtgcagccctgtgttttctgttcttgttttttttttttttttgcgttgtcaagaaattgaagagcagttagtagatgtcttcatgaattgtggagaaaatctcagccttaagaagctaccttttaattattgacgctgcccgcatagataacacattacatcacattaccaatttgtttctccttgtcattcaaaaaagccacatctctttgcctgtaatttgcaactttctattttattttcaaaaaacaataaagctctctttactcatgagtttggaagagggaagtttcaagctttagtgaagagccctggtctggtataattttgtccctgttttgattacggaaaaggtgtttaacttttgttacttttttatttatttaagcactatccagatttctgttaatagtgctcaggatcagaattctaaaattattgaagagatttttctatagttgcagcatttatgctgctttccctccttttcaaacatgtgagagattacaatctcaacacatgaaagtgatggaaaagactaatttgacaattctctagaataaaatcataaaatgaagttaaaaccaatgcaaatattaaaataaatggcacttaattttgaaagaagtttttaatcagtatagcttatcaattaatcttagcatttaaaataactagttctgatttttgtgttgggaaatgcaaggagaaaggttaaaagttaaatgtatctgggatagctgtgttatttataattcccctggaattgtttttgattaatgcttgttacattttccccaggaggctggggagtgtttcagtcgaggctaacatggatggtttttaatatcaggagctccacaaatatggattaactttttagagatagatggtaatctcttttctcagttaaggtcatataaattataactgctacctgaacttagaaaaaataagataagtaacattatttgctgttgtcactttcaattatactttaccacttgagagaaattgtacttgttaattaagtcatcacagaagagatttttaattggcagaattcagttttggagattcctacctgtgtaacgtagtatggctactttccagtaaactggtatagtgagaatttgaccatcagggcccatggaatatttcagttggcctgtttattcagtgaccttccagaaaaaaaggataatctttttaaattaaaaaaaaaaacaagattaaataaaatctcccatttttgtgaatccctcccctcagaaaactgaaatttcctctctggttttcaattccatctttatttctgatacctgaggatttcccttctttcttgaaagatcagctatatatttaattttatttggtgatggaagaaagttatttttatctagcatctccagtcagagttttttgtgttgtgttaatttaccatatggatttttagaattagtagaatatttacagtcatgcattgcttaacaacggatacattctgagaaatgtgtcattaggcaatttcatcattgtgcaaatgtcatagagtgtagttacacaaacctagaaagtatagcctactacacacctaggctgtgtgatatagcctattcttcctagtctacaaacctttacagcatgatactgtactgaatactgtatgcattagtaatacaatgtaaatattgtgtaccaaaacatagaaaaggaaaagtaaaaatgtggtattttatgggaccaccatcatatatgctgtccatcattggccaaaatatcattctgcagccatgactatcttatttagcgaggcctcctggaacagggatgtttgtaagtctttagaagaaagaaggttaaaataaataatctatgatatgcatattttctcccactcagacttcttctgagaaaggcatacaagctactgcttgccagtggaatcattttagaatagaatcagttaatttgctatctcttgtgctataatatttcatatttgttgatcttttaaaattttaaaaatgttggctaggcacggtggctcacacctgtaatcccagcacttcgggaggccaaggcgggtggatcaggaggtcaggagatcgagaccatccttgctaacacggtgaaaccccgtctgtactaaaaatacaaaaaaaaaaattagccaggtgtggtggcgggcgcctgtagtcccagctcttagggaggcgaggcaggagaacggcgtgagcccaggaggcagagcttgcagtgaagtgagattgcaccactgcactccagcctgggccacagagcgagcctccgtctcaaaaaaaaaaaaaaaaaaaatttttgcccagattggataagggtaccccttttgccacgttcttgccagcatttgttattgcccatcttttggataagagccattttaactggggtgagatgatatctcattgtagttttgatttgcacttccctgatgatcagtgatttgagcaccttttcaaatacttgttttccatttgtatgtcttcttttgagaaatatctattcagatcttttgcccattttaatatcagattattggagtttttcctattgagttgtttgagcttcatatattttctagtgattagtctcttgttggatagtttgcaaatattttctcccattctgtggtctgtctcctaactttgttgattgtttcctttgctatacaggagctttttaagttgatgtgatccaatttgtccagttatgctttggttgcctgtgcttttgggtattactcaagaaagttttgcctagaccagtgttctggagagtttcctcaatgttttgatttgatttttgtatatgacaagagataggggtctagtttgattcttctatatatggatatccagttttcccagcaccatttattgaatagactgtcctttccccattgtgtgttcatggcacctttgtcaaaaaggagttcactatagatgtatagatttacttctgggttctctattctgttccattggtttgtacgtctgtttttatgccaataccatgttgtgttggatactataactctgtagtataatttgaagtccagtaattaatttgactccattttgttctttttgctcaggatgactttggctattctgggtcttttgtgattccatgtattttaggattgttttttctgtttctgtgaagtatgtcattggtattgtgataggagttgcattgaatctgtagattgctttgggtagtatggacattttaacaatattgattgttccaatccatgaacatggaatatttttcccttttgttttttttttggtgtcgtcttctatctctttcatctatagttttcattgtagagatctctcacttctttggttaagtttattcctagttgtttaattttatttgtagggattgtaactgggagttacattcttgatttctttttcagattgttcactgttggcatataaaaatgctactgatttaataccttgtttcttaaattaaaataaatgctactgattttttgtgtattgattttgtatcctgcaactttactgaatgtgcttatcagttctaatagcttttgggtggagtctttagcttttccaaatataagttcatatcattctcaaataagaaaaatttgatgtcttcctttctaatttagcttccctttctttttcttatctgatttctctagctaggacttccagtactatattcaataatagtggtaaaagtgggcggccgggcacagtggcacacgcctgtaatcccagcactttgagaggccgaggtgggtggattgcctgaggtcaggagtttgagaccagcctggctaacgtggtgaaaccctgtctctactaaaaatacaaaaattacccgggtgtggtatcgcacacctgtagtcccagctagtcgggaggctgaggcaggagaatcgtttgaacctgggaggcagaggttgcagtgagctgagatcgtgccactgcactccagcctgggtgacagcaagactccatctcaaaaaaaaaaaaaaaaaaaaagaaaggaaaagaaatggacatccttatcttgttccagatcatagaggaaaggctttcagtttctccccatttaccatggcactagctgtgggtctgtcatatatggcttttattgtgttgagctatgttccatctatagtcaggtttttgagggtttttttttttatcatgaagagatgttgaaatttatcaaatactttttcagcatcagttgaaatgatcatatgggttttgtcctccattctgttgatatgacatttgactttcatttgtgtatgttgaaccatcctttcatccctgatatgaatcccacttggtcacgatgaatgattttttttcaatgtgttgtcaaatttggtttgctagtattttattacggatttttgcatcaatgtttatcagagatattggcctgtagttttcttttttcaatggatctttgtctggttttgatatcagagtaatattggccttatagaatcagtatggaaagtattcctcctcctctattttttgaaatagtttgagtaggattggtattaattcttctttaaatatttggtagaatttggcagtgaagccatcaggtcctaggcttctctttgctgggagactttactacagcttcaacctcattatttgttactggtctttttatgttttggatttcttcatggttcaatcttggaaggttgtatgtgtataggaatttatccatttcctttaggttttataatttattggcatatagttgttcgcagtagtctctaatgatcctttgagtttctgtggtgtcagttgtaatgtctcctttttcatctgtgattttatttatttgggccttctctccttagtctagttaaagttttttctattttgtttatcttttcaaaacaccaacatttcattttgttgattctttgtattatattctgtttcaatttgatttatttctgctctgatctttattatttcttttcttctactaattttggagttggtttgctcttgattttctagttctttaagatgcatagctaggttgtttttttttttgaagtttttctactttttcatgtaggtacttatagctataagcttctcttttagtactgcttttgctctattccataggtttgctatgttgtgtttccattattatttgtttcaagaaattatttaatatccttcttagttttttcattgatctgccaatcattcaggagcatactgtttaatttccatttgtttgtattaatttccaagttcctcttgttattgatttctagtgttattctgttgtagtcagagaagatacttttaagattttaattttttaaatttttttctttttcaagacagggctactctgttgaccaggctggactgcagtggcacagtcatggctccttgcagcctcaactcttgggctcaagtgatcctcccacctcagcctcctgatgagctgggagtaccactctgcctgtttttttgttgttgtttttttgtttgtttttaagagatagggcctgactgtgttgcccaggctggtttcaaactcctgggcccaagaagtcctcccatcttggcgtcccaaagtgttggaattacaggcatgaaccattgtgcctagctgaatttttaaagacttcttttgtggctaacatgtggtttatccttgagaatgatccatatgccaggagaagaatatgtattatgcagccattggatgaaatgttctgtaaatatctattaggtccatttggtttacagtgcagattaagtccaacatttctttgttggttttctgtctgaatgatctatccagtgccgaaagtgggatattgaaatttccaactattactatattgaagtctagctgactctttgactttaacaatatttgctttatataactgggtatttcagtgttggatgcatatgtatttacaattgttgtatcttcttgttgaaatgatgcctttatcattgtgtaataaccttttttgtctctttttttagtttttgtattgaaatctatttgatctgatatagctattcctgctctttttggttttcattggcatggaatattttctgtgtgcctttattttcagtctatgtgtgtctttataggtgaagtgtgtttcttgtatgcaacagattgttgggtactgttttgttaatccatcaaccactctatgtcttttgattggagagtttagttcacttacattcattgttattattgataagtaaggacttctgccatttttaatttgttttctggttgttttgtgctcctttttgtgaaagtgttttctttagtggtatgctttaatttcttggtttatctattgtatgtctgttgtagattttttaacttgatgttacatgagggttgcaattaacatcttacaatgcattattttaaactgataacagtttaactctgattgcaaaaacaaacaggaaaagagaaaactaataaaaactctacactttatccttcttgctttttaactttttattgtttctatttttgtcttattatattgtctatgactttagaaattgttgtagttattatttttgataggttcatcttttagtctttctgctcaagatatgagtttacacaccacaattacagtgatataatattctgtatttgtctgtgtacttacttttacatgtgaattttgtaccttcagatgatttcttatcgcttattaatatccttttcttttagactgtgggacaccctttagcatttcttgaaggctaggtctgatgttgattaaatccctcagcttttgtttgtccaggaaagtctttatttctcctttatgtttgaagggtattttcaccggatatactattctacaataaaaattttttccttcagcacttcaaataaatcatgccactgtctcctgcctattaggtgtccactcagaaacctgctgccagatgtattggagctgctttgttttttgttttgttttgttttgtttttaattttctcttgctgcgtctaagatccattctttatctctggcctttgggagtttggttactaaatgtcttaaggtagtcttctttgggttaaatctgcttgatattctataacctttctgtgcctgaatattgatatctttttctaggcctagaaagttctttgttattatttctctgaataaactttttaccccaatctctcttgctacctcctctttaaagctaataagtcttttttttttttttgagacagagtctcaccgtgttgcccaggctggagtgcagtggcgcaatctctgctgactgcagcctctgcctcccagattcaagcatttctcctgcctcagcctcctgagtagctgggattacaggtgcacgctgccatgcttggctaatttttgtatttttagtggagacggggtttaaccatgttggacagactagtctcgaactcctgacctcaagagatccactcgcctcagcctcccaaagtgctgggattacaggcatgagccaccatgcccggcccaataactgttaactttgcccttttgaggctattttctagatcctgtaggcatgctttgttacttttattctttttttatttttacacctctgacggtatattttcaaataacctatcttcaagctcgctaattctttcttctgcgtgatcaattctgccattgagagattctgatgcattctttaatttgccaattaattttttcaacttcagaattctgcttgattctttataagaatcaaagaggtttttaatctctttgttaaatttatttgataggatcctgagatccttctttgagttttcttgtatttcattgagcttcctcaaaacagctattttgatttatctgagagttcacgtatctctgtccctctggaattggtcactggtgccctatttagtttgtttggtgagatcatgttgtcctggatgatgttgatgcttgtggatgttcactaatgtctgaacattaaagagttaggtatttattctaatcttcacagtctgggctggtttgtacccatccttcttgagaaggctttccaagtattcagagggaatcttaagtctttggtcactgaagccatatgtgagcatattagggggtaccccaaggccagtaatgatatgactcttgtagtctcatagaggcaccaacttgctggtcttgggtaagatctgggagaattccctggattaccaggcagagactcttgttctcttctcttattttcccccaaccaattggagtctctccctctctctgtctctctctctgttctgagctgcctggagttggcagaagggtgacacaatcctgtggccaccatcactgggactgtgttgggtcacacctgaagccaacacagtactggattttgcctaaggcttgtggtgactatttcctggctaccacttgtgtttatttaagacccaatggctcttcagtcagcaggagatgaatttgccaggactgggtctttcttttcagtgcagtaggttcccttctggcccacggtggttctagaaatgctgtccaggagttggggcctgggattagggactttaggaatctgcttggtgctttatttcactggggctgtcatggtacccaggttacaagacaaagtcctttttattcttccctttgattttctcaagcagacagagtctctgcccatggccaccactgccccagacctgtggctactatagtctggctactgctgatatttattaagggcccaacgtctctttaatcagtagatggtgagtcctgccaggcctgggtctctccctttagggcagtgggtttccttctggcccagagtgggtctagaaatgccctctcggagctaaggccaggaatcagtgactttaggagtctgattggtgctttattttactgtgactgagctggtacccaagttgcagacaatttttttttttttacttttccctctcctttccttaagcaggagtctccctgtggccgccacagctgggaatgtgttggatcacacccgaagtcagcataatactgagtcttgcccaaggcctgtggcaactgctgcctggctaccccgatgtttattcaaggcccaagagctctttagtcagcaggtagtgaaatctggcaggactgggtcctttccttcagggtggcaggttcccctctggcccaggatgggtctagaagtgtctgggagttatgacctagaatgggggcttcaggactctggttgctgctttattttattgtgggtgtgctggtatccaagttggagaacatagtctcctctactcttacctctcctcctggagctatgaactgtgctgtctgaagttggaggaggggtgacacaagcacacccttggccgccccgtctggtgtctcactggttcatgtgcatcccaaatctactggctccaagaccagcacagtaccaggacttgctcagggactgcagtccttatggtctagactgccttttaagtttatttaggatcttggagtgctttagcctacaggggcaaggcttgcccaaacttagccttaaactgctgggatggatgattcccctctggctgaggctggtctaaatactccctccatgggtgcaagctgacttctgccctctgttgccttccactgcgacagggcagcactgagttccaatgcaaagtcccacaatcactttgcccttcgtcccgcaaaggcatagattctctctcagccaccacactgcactgccagggcatgtgggaggggtggtgtgggcaattcaagactgtctttcctaccctcttcagtgcctctttccttgatacgatgttgaaactaggtactgtgatcagtcacctgatttttggttcttatgtaggtgctttcttgttagaataattgtttaatttgatgttccttggtggggactctcactggagggttctaatgagccatcttgctccgcctcctcctccatatttgttgatcttaaaaaatgctcctgtaaatactgttgtacttaagtccttgtgtacatagatgtacatttatctagggaaacatctaaaaatacagttcctgggtttttattttagaactttagtaagcatgtcaaacatctctttagaatgatccatcaatttacactcccaccaacagtgcatttagaactctttctgctgaccggtgagattatcttttcatgtatttcttagccattctatatggtatcttgtactaggttaattatatcttacatattgatttttaggagttattcacatattctggataattatcatttgtctcaatgatgtatattttagatacttctgtagatattttagatatgtctacaggaagaagtatctaaaatatccccttgtttttttcattttgcacatgatattttttctcatactaaaggtatataattttattattgtggaatttaataatttttgctattaagattgtattttttaaatctttccacatgctaaagaactattctaaaattttaaatgaacttttaaaaatttcttttcacttttagactttatctggaatttggttttatgttttagtataagatagtgattgaatgttattgtttacttctttactcatttttactcctctctatgaattttggaattatttgtaaagatccatgaaaaaatttgaagggagaatgggaatagtattaaatttatagattactttggagaaaaaagataataatattaaatattttcacacgtaaacatagtggatttctccatttattgaaggcttctttacattcttcaatattttataaattttttaaaataaggtcttgctctgtcacccaggctggagtgcagtggtgttcatagctcactgttacctcaaattcaggcaatcctcctgcctcaccctctctagtagctgggattacagacacaagttatcatgcctggcttattttttggagggatggggtcttgttatattgcctatgctggtcttgaactcctgggctcaagcaattctctcacgttggccacccaaagtgctgtgataataggtgtgtgccggcataactggcaatattttataatgttatctatgaagtttttttatatttcttattaattttatttctgttctaatagttttgtaacttgtgaattttttaaaaaatatacatgttttataatattttcttacctttttattttgaacaatttcaaacctacagaaccattaaaagagtaatataagtagtacagtgtacacctgtatacccaagaactagatccacaaattggtaacgtttcgcttattcccctttatttgtatacacacacatacacacacacacacacacacacacacacacacacagcatagttatgttcagttttttatttgctaagttatttgaaaataagttgcaagctttatgatactttattcctaagcacttcaatatgtgtctcttaaatctaagacactctttataaaacctctatgccatcatatcaaagatatttaatatttgatacattataatagccacacattattatatactctgttgtctgttgaatgggatttaaaaaaataaccttttctaagtagttattacaaattattatgggctgggtgcagtgtctcacacctgtaaatctcaacattttaggaggctgaggcaggcagatcacctgaggtcaggagttcgagaccagcccagccaatggtgaaaccctgtctctactaaaaatagaaaaattatctgggcatggtggcgcatgcctgtaatctcagctactcaggaggttgaggcatgagaatcgcttgaaccgggaggcagaggttacagtgagccaggatcacaccactgcactccagcctgggcaacagagtgagactctgtctcaaaaaaaaaccaaaagccaaatggttatgaactttcgattttgtgtacatatatagcaataattggaaattcctattagttgcaatactttggctttagattttcttgagcgcagcgataaattcttattcagtgtaataagttgactcaagtttttgcttatctttgtaaataatcaggtcatctacaaataattttctttttttcccgtgtaacttttaataaaattaattattgaaaaagattcttcaattaattttaatatcctaattactttatttgatatatatttttaaaaaaattgtgtcttagttaacttataagtacatgaaaatgaaatctaaatttttgtattttaggaaaattcacgaattgtgagagtaagagttatagccggaataggccttgccaagaaggatatattgggagctaggtaagtatatctatttggattataattttaaaactttgcatttgttaattagttttttccaaactttggttaaattagaaatcaaatagtattagtaaattgttgtggaaagtataataataatattaccagttggtggtttactaaatctcttggtatctgaattactaaatttgtgaaattaggcagaagtacaaatgatagcaatagtcacaagatacattattgagctctgcttctggaaatttgcaaaattctaacagactaatcctttagcagataacaaccataaactctggacttaatacaaaaagcagcaacctgaaggcagtggagagtgaacagagcaggcagattctggtggggagttcatgtttggaagaagggaattgtactgagtgagttcctgatactatgaattggtctgagggcaggtagaatcagaacctggaaaaattgtagtcttcatggcctgggaacatagcagaatccaaactttggttcaattaaaaatcaaatagggccaggcatggtggctcatgcctgtaatcttagtaatttgggaggccgaggcaggcggatcagttgagggtcaggagtttgagaccagcctgaccaacatggtgaaaccctgtctctactaaaaatacaaaaattatccagaaatcgcttgaacccaggaggcggaggttgcagcgagccaagattgtgccactgcactctagcctgggcaacagagtgagcctctgtctcaaaaacaaaaatacatacaaacatgcatgcatacatacatacatacatacatacatacatacataccaaatagtattagtaagttgttgtggaaagtagaataatatttccaattgttgatttactgaatctctgaatctgaagaaaacatggcagtggtaaggattctggaagagagagagctgaagagctcagcaactcatctgaagacaaaagatctgaacagagatcacagtcactgcctaagaaacggggtttgggagactgaggcagacaggttgcttgagctcaggagtttgagaccagcctgggcaatatggtgaaacctgtctctacaaaaagtacaaaaaatcagctgggcatggtggcgcatgcctgtactcctggctacatgggtgactgagtcaggaggattgcttgagtctgggtggttgaggctgctgcagtgagacaagattgtgccaatgcactccagcctgggtgacaaagtgagaccgtgtctcaaaaaacaaacaaccaaaaacaggatttgtggctcttgtccaaacaggatgattagttgcatgatagtcttattatgtttagtgttgctataacagaattcctaagactgtgtattttgtaaagaaaagaggttgatttggtgagtggaaagttcaagactgggcctttgcatctagtgagggcctcaggctgcttcaagtcatgacagaaacgggaaggggacctagcgtacacaaagaaatcacatagcaagagtggaagcaagggggaggtgtgccagcctctttttgacaaatcgagaggaacaaatagaatgagaactcactcacttccgagggagggcattaatctattcaggagggatttgctcccatgaccctaatacctccaaccgagacccatctttcaatattcccacattggaaatcaaatttcaacatgcggtttgaaggatacaaatatccaaaccatagaatgataagcagacacacacacacacacacacacacacacacacacacaccagcagcaaaattcacacacacacacacacacacacacacaccagcagcaaaattcagtctccaaaacttaacatttataatatatgtccaggatataatgcaaaattacttatctaaaaagaaccaggaaaatggaaggcatttttagtagagaaaagaaaatatggccacaataaattttaaaaatatgaaatgaaatggaaaccataaaaaaatgaaaattccaggagtgaaaaatacagcatttgaaattaaaattgttgggtagatttgtcagccaaatggagaagaggaaagattaactgaacttaaagatagatcagtagaaattgttacgcagttggaagatgagagagatgagagagacaaagattggagaaaaacaacaacaacaacaacaacagagccttgaggatttgttagctaatatataaaagtctaacatggatatcattatataatatcttacagtctaacacagaaaggggagggaaaagaagaaggcacaatattttttgaagaaatattggccaagtttttttccaaatttgattaaatttatatagtatttaaaaacaccaagcaggataataaacattaagaacacaatgaagtgcataatagtcaaactgttgaaagccaagtataaagagaaaaatcttgacaaaaagagaaaaatatgacactttatatatgggggaactacaattcaattaattactgacttcctacccaaaactacggagaccaggagaaaatggaacaataaaataacaaccatcaatccatagttttatattcagtgaaaatatcctttaaggaagatgacaaaataacattttccaaaaaaagacacctagataattcatcattggcagacctgtgctgtaagatatcttaaagtcctttcagctgaagaaaattgaaaccagatagacactcaggtccttagaaaggaataaagagtatcaaaaatagtaaatatctgggaatatacaaaacatgttttgcttttctcatcatacctttttaaaataaaacatatgcctgttgaaatcacaagttaaaacattgttttttaggatttatattgttggtgaatggaatacataaaacaactataacataaaggatggagcaggtataagttatagacctatttggtagaatggtacaatactaagtataagttgaataaaagattaatgatgtatattgtaatatccagagaaaccaataaaaaataatgcaaagaattatagataaaaaacagtagaaattttaaaatgaagttgttgaaaaactaaataaaaaagccaggaacttgagcccagaggttcaagaccagcctgggcaacaaagtgggaccctgtcactagaaaaagtcaaaaaattagccaggtatggttgtatgcatctgtggtcccagctacaaaggaggctgaggttggaggatcgctggagcccaggaggtcaaggctccaatgagccatgattttgccactgcactccagcctaggcgacagagtgagaccctgtctcaaaaaaaaaaaaaataaaaaagagtgccagaaaaggagaagcaaatgatttaaaaaagtaacggaggccggttgtggtagctcacgcctgtaatcctagcacttagggaggctgaggctggtggatcacctgaggacaggagtttgagaccagcctggccaacatggtgaaatcccatctctactaatatacaaaattagctgggtatggtggcgcgtgtctgtaatcccagctactcaggaggctgaagcaggagaatcagttgaacccaggaggcagaggttgcagtgagctgagatcacaccattgcactccagcctgggcaaaagagctaaacatcaaaaaaataaaataaaaaaaataaaagtcggaaaaggaggaacaaatgaacaaaaaaagtaaaagaggctgggtgcggtggctcacccttgtaatcccgacactttgggaggctaaggcgggtggatcacctgaggtcaggagttcgagagtagcctgggcaacatggtgaaaccccatctctactaaaaatacaaaaattagctgtgtgtggtggcaggcatctgtaatcccagctactcaggaggctgaggcaggagaattgcttgaacctgggagatggaggttgcagtgagccaagattatgccactgcacttcagcctgcatgacaagagtgaaactccatctcaaaaacaaacaaaaaaacaacgtaaagggcagtgacaatggaaaacaaacaataaacctgtagactaaatccaatcatatcaataattacaaggaacattaatggattaaaataaatatgagacagatgttgttaggataaattaaaaaacaagacccaactatatactgtcctacgtgatgcacttaaaatataaagacatagctaatttgaaagaaagcggacgcaaaaagatatgccatgcaaacagtaagcataaaaagactgaagtggatatattcgtatctggtaaaatagatttcaacacaaaaattttcaaacatttcatgatgataaagaataaagtcaatcaggaatatataacaatcataaatgtgtgtgtgcctgctaaaagaacttagaaaaatatgaatcaaaatttgacggaattaaaggggaactttttaaaactcccaccgtcatagttggaggcattaacacttctctttcagcagttgataaaacaactaaataaaaaaatcaaaaacataaatttaaacaatattatgaataactttgacctaaagaacactatttctaacaactttcttttcaaatgtacattcttttcaagtgtacatggtacattcactagcatagaccacacatgggctgtattagtttattgcttcataataatattaccacaaactggccaggcgcggtggctcacatctgtaatcccagcactttgggaggctgaggcgggcggatcacaaggtcaggagattgagaccatcctggctaacactttgaaacctgtctctactaaaaatacaaaaaattatccgggtgtggtggtgggctcctgtagtcccagctgctcgggaggctgaggcaggagaatgatatgaacccgggaggcggaggttgcagtgagccaagatggggccactgcactccagcctgggtgacagagtgagactgcgtctcaaataataataataataataataccacaaacttagttgcttaaaagaacgtacatttattgtctcacagtttctgtggttcagaagttcctgcattgtttaactgggtcctctgctacagggtcttggaaagctgctgttgtatttttttttctactttttttctaattttttctaattttgcagtcttgaagtctctcacatgagagtggctgtaaactctagccctgccctgatgagactctaggaatttggacatagatgtttacagtgtgcctttcatgggtattcttaggcaagtgccctcatgcctaagtgtctgacctatgaccagatgtccctctcacagcaaacttgcatatcctggcagatgctcttatagctcttgtctgtgtccagtttgttcctaccaaaatagcagatagccactctctaggagaatcctgacaaacaagttagggtcgagtgtatcagtcaggtgagacacgggaggcaactcaacaaaacacaagaaataacagcagtttattacttacagatgccagagagaagagggcagcatgcctcccagggccaacaggaagtggggagccatctaggacatgcacagtcaactagtgggtggggaacagggcaaagagtacaagtgacctgtgggctgaggcttttactggggtccagggcattttccaagcaggtttccctcagggagttgtaattggtgggtttagagcaagtaggcataaatttcatggagtcatgctgtgtctgagaaatcagtattagggttctctagggggacagaactaataggatagatatatatatgaaggggaatttagtaggagaattgactcacatgatcacaaagtgatgtcccactattggccatctgcaagctgcggagcaaggaagccagtccgagtcccaaaacctcaaaaataggaaagccaacaatgcagccttcagtctgtggctgaaggtacaagagcccctagcatatcactggtgtaagtccaagagtccaaaagctgaagaacttggagtctgatgttcgagggcaggaagcatccagcacgagagaaagatgaaggccagaagactcagcaagtcaagtccttccacgttctgcctgctttattctagctgccctggcagctgattagatggtgcccacccagattgagggtgtgtctgcctctcccagtccactgattcaaatgttaatctcctttggcaacaccctcacagacacacctaggaacaatactttgcatccttcagtctaatgaagttgacactcaatattacccatcacagagaggtggttactgtggcttatttctgcagtcctttgggggtatggggtcagtggagcaagtcaagtaggttgaatctggttgtttcttagggagatggttaccaggaggcagttgtgtaaggtagttatctggattgaccacattgaggagctgagaggaggtagagaactggaaactgtgctaagggtgactaagacctgcttctggtataaaaatgtccaacttaacattcattatggatgctgaggcaacataaaattataggaattcacttcagctgtcattaaggtattggtagggctgtggtcttagctgaggcttgcttagggaaggattcacttccaagctaatgtggttgctggtggcattcagttccttgcatgctgccagtctgagcgtttccatttcttactagctgtcagctggaggccgtctcagcttcttgccattcagcagctcacaagctgccagtttgcttcttcaaagctagcaagagtctcctagcaagatggattacaatcttatgtaatgtaatcacatactttttgtcacatttgccataatctgttggttagaatatatagatctgtcccatgcttaagaggagaggaacacaaagaacatgaatattaggaggtggggataataggagctgccctagtgtctggatgccacaatattccgggccttgaaacaataaaccacattcttttgaaatgcacatggtacgttaatcaagatagaccatgtgtgggtccataggacaagtttcagaggttttcaaaagattgaaatcatatagaggatgttctttgagaacagtggaattcaattggaaaccaataatattaagatctagaaaaactgcagatatttggaatttaattagtatacttctaaataatctatatgtcaaagaagaaaacattttgaactgaatgaaaatgaaaatacagcaatatcacaattgtggaatgcagctaaagttatattcagagggaagtttatgtctttaaaatgcttaacttagaaaaggagcaagatataaatgaatgttttgagttctgaccttaataaattagaaaaagaagagcgaatgaattctaaaataagtagagggaagaaataataaagacaagggccaaaatcagtgaaagagaaagtggacaatggtagaaaaaaaattattgtaatcaaaagcttgttatttgaagacatcaattaaagttttaaacctctagctagaatgatcaagagttagagagaaggcactaattactggtaatgagaatgaaaactggggcattgctatagaccctgtggaaatgaaaaagataaaaagaaaacattttgtacaattttgtatcagtaaagaagtacacacaatttagtgaagtagataatattcttgaaagacacagatttcagaactagccacagaacaaatacaaaactttaatagatgtttattattgaaagaaattgaatttgttgttaaaagaaattgaatttgttgttaattaaattgaatttgtccttcccacaaagaaaactccaggcccacatgatatcactggatgcagctatcagacatttagggaaaaaaaaataaaaattctacacaaacacgttcagaaaatggagggcatttcccaactcattttattaggctaatattatcttgatccccaaaccagacacagacatcacaagaaaacttaaaaccaatatctgtcaacatagatgcaaaaatgaaattaaacattatgtagcaatatatcaccacttaggatttttcctacaaatgcaaggtttgttcaacattaaaaaaattaattaatgcaattcactgtattaatacagtaaagtagaaaaaacacatggtcatttcacttggcatggaatgtgcctttgacaaaatgtaacacccagtcatgataaaacctctcagcaaactaacataaaatacaaaggtggcttaacatctgaaaattaactgatgtaatacactgtattaatagaataaaagaagacagtcatcttttttttattatacgttaagttctagggtacatgtgcacaatgtgcaggtttgttacacatgtatacatatgccatgttggtgtgctgcacccatcaactcatcgtttacattaggtatatctcctaatgctatccctcaccccttcccccactccacgacaggccctggtgtgtgatgttccccaccctgtgtccaggtgttattgttcagttcccacctatgagtgagaacatgcggtgtttggttttctgtccgtgtgatagtttgcttagaatgatggtttccagcttcacccatgtccctgcaaaggacatgaactcatccttttttatggctgcatagtattccatggtatatatgtgccacattttcttaatccagtctatcattgatggacatttgggttggttccaagtctttgctattgtgaatagtgccgtaataaacatacatgtgcatgtgtctttatagcagcatgatttataatcctttgggtatatacccagtaatgggatcgctgggtcaaatggtatttctagttctagatccttgaggaatcgccacactgagaagacagtcatcttaataaaagcagaaaacacaactgacaaaattcaacacccattcataatagacactctctgcaaactaggaatagatggaaatgtcctaaacctcatcaggggtatctatgaaaaaacccagtagctaaccacctacttaatggtggcagtttgaagcccctctacttaactcaggaataaggcaaagttgtctgctttcatgttctatccaacattgtactatatattttagccatgtagtatggcaaagaaaaaaaaatcacacagtcaaaaaggaagaagtaaaactgtctttatttgcagacaacatggtttgtacgtagaaagccccaaggaatctacagaaaaaactactggaagaactaataaatgaatttaacaccaccacaaaatgcaaagtcagtgtttgtataacccaaaatcagttatatttctgtatcctatcattgggccattggaaaatacaatttaaaaacgtgtttacaattgtataaaagttaaatatttagaaataaatacaacaaaagatttgtaataaatggacactgaaaactataaaacagtgctgagagaagtcgaagacaacataaatcaatggatacatatgctgttttcattagaagactcaatagtgttagggtggcatttttctccaaattgattagatttggcacaatcccaataaaaatctcagcaagttttttcagagaaattgataagctgatttcaatatttgtatggaaagtcaaggcacatagaatagccaaaacaatttcaaaaaagaacaaaattggaagacttacattaccccatttcaagacttgctacacagttataataagacagagtggcagtggcatgagaatagatatattgttcagtggaatggagagtgtaaaaatacatgcgcatgtgtgtgtgagagagcgagagagagaatatatacacatatatatgatcagctcctgtttaacaaaaaatgctgaggtaattcaagggaaagggtagtctttcagtacacagtactagaacaactggtctgtatagaatgaaatgaatcttggtccttaccacacatcatacagaaaattagtatgagctaaaatgataaaacttctataggaacacataggaaaaaaatctttgctctattgggttacacaaagtttacgtgaacagtaccaaaaaggatgagccataaaagaaaaatgttgaaaggaacttcaacacaattaaaacttttcttctttaagaaacaaggttacggaaaatgcaagccatagattgggaaaaagtatctttagacatatatctggaaacaacctaaatgtccattgtcaaatgaatgggtaatctcatgtaccccataaatacatacacctactatgtacccacaaaaattaaaaacataaaaaaaagaaatgtgggctgggcatggtggctcacacctgtaatctcagcactttgggaggccaaggtgggaggatcacttgagccctggagttcgagaccagcctggtgataagaccctgtctctacaaaaaaatttttgaaaaattagccaggtgtggtgatgcacacctgtggtcccagctactcaggaggctgaggtgggaagatcacttgagcccaggaagttgaggctacagtgagccgtgtttgtgccaccttactccagcctaggtgacaaagcgagaccctgcctcaaaaaaaaaaaaaaaaaaatgtagtatagatccttttgtagtttttaagtgtcatgatggggtgtccatgcacatgtgtaagatgtgccactcttgaagcttgttacaacatgggcagattaccaatctcacatgaaaagaaaaaaaaaagaaatgtatatacatacagtgtttattcagcctttaaaaagaaggaaattcatgtgacaatatggattaatcattaggatattacactaactgaaataagacagtcacagaaagacagatactgcatgtttacatttatatatctaaaatagtcaaattcatagaatcaaagagtggaatgctggttgctgtgttggggtgaggggtgaggggtaagtagaaatggaagttaataattaacaggcattaaacttgagtcaagcaggaagaataagctctagagatctgctgtacaatgttgtgcctaaagttaacattaatgtatgtgcaattaaaaatttaagagggtagagctgccaggtatggtggctgatgcctataacctataatcacaccactttgggaggctgaggcaggtggatcacttgagcctgcaaatttgagaccatcttgggcaacatggtgaaaccctgtttctacaaaaaaacacaacaattagtcaggcatggtggtgtgcgcctgtagtccccgctacttgggaggctgaggtgggaggattgcttgagcccgggaggcagaggtttcgagtgagccgagattgcagcactgcactccagcctgggcaacgttgcaagactctgtctcaaaaaatgctggaatgcagtgcagtgcagtgcagtgcaatgcaatacaatgcagtgcagtgcaaaatagggtagaggtcatgttaaatattcttaccacaagagaaacaattaaacaaagatatctgaagaaggccattaaccccctatatatatgaaacctcttacaactcagtaataatataattaaaaagccaattaaaaatggcaaaactcggctaggcacggtggctcacgcctgtattcccagcactttgggaggccaaggcaggtggatcacctgaaactgggagttgaagaccagcctgaccaacacagagaaatgccatctctactaaaaatacaaaattagccaggtgtggtgatgcatgcctgtaatcccagctacttgggaggctgaggcaaaagaatcacttgaacctgggaggcggaggttgcggtgagccgagatcgcgccattgcattccagcctaggcaataagagtgaaactccatctcaaaaaaaaaaaggcaaaactcttgaacacagtgtctgtgtattgttcaagtgtatttgtttagctggatggtgagattagggatagatacataattacatttacattttgtatttatatttaatagtatatagttagttgtaaaaaaccatggataagactggaaagggaaaatgtagagagaacagagggctggggcaatacttagggaatatcagtatttaactggcagatagtagaagaggtgcctaagtaagccaccgaaggaacagttcgagtggtatgaggagcactagaagagatgtgtcgtagaagcaaaatgagatgagtgtttcaaagagaaaatggtcagtagtatctaaaaacataaagagggccaaaaaaagaagtatctggaaaatgttgattactttaacaagactgatgactttacaacagccttttcataggagtggatctaaagggaagagacagaaaccagactgtagggttttgaagtgtaacatgaattaaggaaatgaagaaaaggaggtggtatgctatagtcgttaagagtataggctgggaggccgaggcaggagggtcacgaggtcaagagattgagaccatcctggccaacttggtgaaatccaatctctacttaaaatacaaaacattagccaagcgtggtggcaggcgcctgtagtcccagctactcaggaggctgaggcaggagaattgcttgaacccaggaggaggaggttgcagtgagccgagatcgtgccattgcactccagcctggcgacagagcaagagagtttaagccgggcatgttggctcatgcctgtaatcccagcactttgtgaggccaaggcgggcagatcacctgaggtcaagagtttgagaccagcctggccaagatggcaaaaccgcgtctctactaaaaatacaaaaattagctgggtgcggtggcgtgtgcctataatcccagctacttgagaggctgtggcaggagaatagcttgaacccaggaggcagaagctgcagtgagccaagatcgcgccactgcactccagcctggattacagagtgagacttcatctcaaaaaaaaaaacaaaaaagaagataaaaaaagaagagtatggcctctggagccaggtgctggagtttcaatcctggctgtccgctttctagctgtgtgatctgtatgaaataaagaaaggaatagtacctacctcacaggtggttatagagattcaaagaattaatatacgggctcagcgctatggctcacgtgggtaatcccagcactttgggagccaaggcgggcggatcacctgaggtcaggagttcaagaccatcctggccaacatggtgaagccctgtctgtactaaaaatacaaaaattagccgggcgtggtggtgtgcgcctgcagtcccagctactcgggaggcttaggcaggagaatggcatgaacccaggaggcagaggttgcagtgagccaagactgcaccactgcactccagcctgggcaacagagcaagactctgtctcaaaaaaaaagaaaaaaaaaaagaattaatacacgaaacgtgattacagtggtgtctggcactgagtaattgctatataagtgttcttgtttttattattaaaaactgcctctgaaaaggtttgactgggaatggaagaaaaggatgtattttgctttgctggagaagggagggaaagtcaaggggaggaggagtttaaaaacatttatatgcctagagaaacctagatcaaagaaaaagccaaaggtctaaaagagagcagtgagaacagatgacgcaaggctccaaagttcagagaactgaacaagggggatgagactcaaaacaagaggactcctgactcactaggttaggggtaaggatggattctgataaataccagtatgttgcgagtgttctggtgccttcgagtttggccaattaagaggtaacgtggtatgaggaaatggagttgggggaaggatagtttggattagtttggagggtacttcgtggagaatggtgagtactttggatacccgaggaaaacaggagaaatttaacaatggacaagtaaagtgtccaaagtcttgtggtttacaaccctatatatcacaagaatttccttctccatgtctccttgtagaagtggttacataacacctagttattttattttattttattttattttttgagacggagtcttgctctgtcgcccaggcttgagtgcagtggcgtgatcttggctcactgcaagctccaccttccaggttcatgccattctcctgcctcagcctcccgagtagttgtgactaaaagtgcctgccaccacgcctggctaattttttttttttgtatttttagtagagacggggtttcaccatgttagccaggacggtcttgatctcctgacctcatgatccgcccgcctcggcctcccaaagtactgggattacaggcatgagccaccgtgcgcggccacacctagtttttgtttttttttttttaagtgaaagcagtttgcctttactttataagaagagtttacacccatgagataacttgagacaacctgaagtcttacaaaaccagcgtcagaatcattgaattaaccatcttatctcaaaagaagaaagaatgtaataaaaatcaaacaaaattttaaaaatctaggaagcttataatcattaggcctgtgattaaaaggttttctttctagttctttgtgtctttcactaacatggtacttcaggtttttaacgagatgcaaaaattactttaattgcttacctgcctaagaatcctgacttttaaattcaggaaataattgtagatataactaacaaggaaaactgtgaattttatagtctgggtaatctgagcttggggtaagcaataattaaaatttttctttctttttttttttttttttaacagtgatccttacgtgagagtgacgttatatgacccaatgaatggagttcttacaagtgtgcaaacaaaaaccattaaaaaggttagacttagcaatattcaaaagtttttaatgtactttgttttatttttataagacaaaaccttatttagttatactatgtttattattttttagagtttgaatccaaagtggaatgaagaaatattattcagagtaagtatatattttattttactaaagtggaaaaagtaagtttttttcttaggaggttagaatgataaattctcatttttaatatttgaagatgtatctcagaatttgcctaaagttgtgaaaatacaaaaggaattgaaattttgtcttataaaaaacataaatgtaagataatggagaggtaaaagactagaattatcttattctagtaaaactgatttagagactgtacagtagtcttactccagttgagcagattcagtgttttctcataaagatgatgcaaattatatttatgtctccccagtcatttattattaaacagattagggcctatcaagtgaatgcatttctttttatccacacgtcattgacattgctgcctttccaccccatctgcctcatttaccataaaagcaaattccaatcagcagttatttccaattcctcagcaaggccctcagactgacagtgtctccttgtacctatttaatatcagagtacttactgttgccagaatcgaaaccctaccagagcagtggtagagatgcattttaggaatttcccctctctggattattcccacttgtatcatccctaaaatgttcttccttgaccccatattcccctttagctgttgagtcgtttctctgttcacctgaataaggaacattcatgggagagttgtctgccctcgtcatttctgcttctccgggacgctcgttaacccactgtactctaaatccccatcactcaaatgaaactgctgttattcgggtcaccagtgacttccctgctgccaagttcatcttatctcatcttactcatgctctttgcagcatttgacatggcagatcattcctgaaacaccagcctctctggaggcttctgtggtaccatacttgatttcagtaaggaaaacagaagccgttcttctgtacttcatgtttaaagattttttgtttgtcttcttttgttcaattttaataaagtgaatttgaagggaagaaattgctgacattaagggcaaggaagctgttgctgaagatccagccaaaggcatcaattaagttgcttctgtttttttggtttggagtaagattttccccactctatgtagtatgacataaaaacaaccttttaaatcggtttggaaattttggattcttgaggaaatggtattgaatcaattggatcgtcaaatgaagaaaaatgaagctaaatttctgtttttactatttaaccagaataaattccagacttgataatgtctggttttgattgcttttttggcacaagtgttggttaggagagtgtttttaaattcccaagttgttgagttatttatttatttatacttttgttttattttacttattttgttacatttttcttagaaacatatgtattttctttttttttttaattatactttaagttctagggtacctgtgcacaacgtgcaggtttgttacatatgtatacacgtgccatattggtgtgctgcacccattaacttgtcatttacattaggtatatctcctaatactatccctccccacttcccccaccccatgacaggccccagtgtgtgacgtaccccttcctgtgtccaagtgttctcattgttcaattcccacctatgagtgagaacatgaggtgtttggttttttgtccctgcgacagtttgctgagaatgatggtttccagcttcatccatgtccctacaaaagacatgaactcatccttttgtatggctgcatagtattccatggtgtatatgtgccacattttcttaatccagtctattattgatggacatttgggttggttccaagtctttgctattgtgaatagtgctgcaataaacatatgtatgcatgtgtctttacagcagcatgatttataatcctttgggtatatacccagtaatgggattgctgggtcaaatggtatttcttgttctagatccttgaggaatcgccacactgtcttccacaatggttgaactagtttacagtcccaccaacagtgtaaaagtattcctatttctccacatcctctccagctcctgttgtttcctgactttttaatgttcgccattctaactggtgtgagatggtatctcattgtggttttgatttgcatttctctgatggccagtgatgatgagcatttttacatgtgttttttggctgcataaatggcttcttttgagaagtgtctgttcatatccttcgcccgcttcttgatggggttgtttttttcttgtaaatttgtttgtgttctttgtagattctggatattagccctttgtcagatgagtagattgcaaaaattttctcccattctataggttgcctgttcatgctgatggtagtttcttttgttgtgcagaagctctttagtttaattagatcccatttgtcaattctggcttttgttgccattgcttttagtgttttagacatgaagtccttgcccatgcctatgtcctgaatggtactgcctgggttttcttctacggttcttatggttttaggtctaacgtttaagcctttaatccatcttgaattaatttttgtataaggtgtaaggaagggatctagtttcagctttctacatatggctcgccagttttcccagcaccatttattaaatagggaatcctttccccatttcttgtttttgtcaggtttgtcaaagatcagatggttgtagatgtgtggtgttatttctgagggctcttttctgttccattggtctgtatctctgttttgataccagtaccatgctgttttggttactgtagccttgtagtatagtttgaagtcaggtagcatgatgcctccagctttgttctttttgcttaggattgtcttggctatgtgggctctttcttggctccatatgaactttaaagtagttttttccaattctgtgaagaaagtcattggtagcttgatggagatggcattaaatctataaattatcttgggcagtatggccattttcacaatattgattcttcctatccatgagtatggaatgttcttccatttgtttgtgtcctcttttatttcattgagcagtagtttgagtagttctccttgaagaggtccttcacatcccttgtaagttggattcctaggtattttattctctttgaagcaattgtgaatgggagttcactcatgatttggctctctgtttgtctgtaattgatgtataagaatgcttgtgattttgcacattaattttgtatcctgagactttgctgaagttgcttatcagcttaaggagattttgggctgagacggtggggttttctaagtatacaatcatgtcatctgcaaacagggacaatttgacttcctcttttcctaattgaataccctttatttctttttcctgcctgattgccctggccagaacttctaacactatgttgaataggagtggtgagagagggcatccctgtcttgtgccagttttcaaagggaatgcttccagtttttgcccattcagtatgatattggctatgtgtttgtcataaatagctcttattattttgagatacgtcccatcaatacctaatttattgagagtttttagcatgaagggctgttgaattttgtcaaaggccttttctgcatctattgagataatcatatggtttttgtctttggttctgtttatatgctggattacgtttattgattgcgtatgttgaaccagccttgcatcccagggatgaagcccacttgatcatggtggataagctccttgtacctttggtagaattcagctgtgaatacgtctggtcctggactttttttggttggtaggctattaattattgtctcaatttcagagcctgttattggtctattcagagattcaacttcttcctggtttagtcttgggagggtgtatgtgtcgaggaatttatccatttcttctagcttttctagtttatttgcatagaggtgtttatagtattctctgatggtagtttgtagtttgtatttctgtgggattggtggtgatatcccctttatcattttttattgcgtctatttgattcttctctcttttcttctttattagtcttggtagcggtctatcagttttgttgatcttttcaaaaaactacctcctggattcattgattttttgaagggttttttatgtctctctctccttgagttctgctcttaccttagttatttcttgtcttctgctagcttttgaatgtgtttgctcttgcttctctagttctttcaattgtgatgttagggtgtcaattttagatctttcctgctttctcttgtgggcatttagtgctataaatttccctctacacactgctttaaatgtgtcccagagattctggtatgttgtgtctttgttctcattggtttcaaagaacatctttgtttctgccttcatttcgttatgtacccagtagtcattcaggagcaggttgttcagtttctatgtagttgagcagttttgagtgagtttcttaatcctgagttctagtttgattgcactgtggtctgagagacagtttgttataatttctgttcttttacatttgctgaggagtgctttacttccaactatgtggtcaattttggaataagtgtggtgtggtgctgagaaggatgtatattctgttgatttggggtggagagttctgtagatgtctgtttggtccacttggtgcagagctgagttcaattcctggatatccttgttaactttctgtctcattgatctgtctaatgttgacagtggggtgttaaagtctcccgttattattgtgtgggagtctaagtctctttgtaggtctctaaggacttgctttatgaatctgggtgcttctgtattgggtgcatatatatttaggatagttagctcttcttgttgaattgatccctttaccattatgtaatggctttctttgtctcttttggtctttgttggttgaaagtctgttttatcagagactaggattgtaacccctgctttttttgttttccatttgcttgatagatcttcctccatccctttattctcatgagcctatgtgtgtctctgcacatgaggtgggtctcctgaatacagcacactgatgggtcttgactctttatctaattcgccagtctgtgtcttttaatgggggcatttagcccatttacatttaaggttaatattgttatgtgtgaatttgatcctgtaattatgatgttcactggttattttgctcgttaattgatggagtttcttcatagcatcgatgatctttataatttggcatggttttgcagtggctggtactggttgttcccttccatgtttagtgcttccttcatgagctcttgtaaggcaggcctggtggtgacaaaatctctcagcttgtctataaagggttttatttctccttttcttatgaagcttagtttggctggatatgaaattctgcattcaaaattattttctttaagaatgttgaatattggcccccactgtcttctggcttgtaaggtttctgctgagagatttgctgttagtctaatgggtttctcttagtgggtaacctcacctttctctgtggccgcccttaacattttttccttcatttcaacgttggtgaatctgacaattatgtgtcttggggttgctcttctcgaggaatatctttgtggtgttatctgtatttcctgaatttgaatgttgtcatgccttgctaggttggggaagttctccttgatattatcctgtagagtgttttccaccttggttccattctccctgtcactttcagctacaccaaacatagagttggtcttttcacatagtcccatatttcttggaggctttctttgcttctttttattcttttttctctaaacttgtattctcactttatttcattaatttcatcttcaatcagtgatagcctttcttccacttgattgaatcagctactgaagcttgtgcatgtatcacaaagttcttgtgccatggttttcagctccatcaggtcatttaaggtcttctctacactatttattctagttagccattgggctaaccttttttcaaggtttttaggttccttgcaatgggttagaacatgcttctttagcttggagaagtttgtttttaccgaccttctgaagcctacttctgtcaactcatcaaagtcattctccttccagctttgttctgttgctggcgaggggctgcgatcctttggaggagaagatgcgctctggtttttagaattttcagcttttctgctctggtttctccccatcttggtggttttatctacctttcatctttgacgttcgtgacatacagatggggttttggtgtgtatgtcctttttgttgatgttgatgctattcctttgtgtttgttagttttccgtctaacactcagttccctcagctgcacatctgttggattttgctggaggtccactccagaccctgtttgcttgggtatcaccagtggaggctgcagaacagcaaatattgcaaaacagcaaatattgctgcctcatccttcctctggaagctttgtcccagaggggcacctgcctgtatgaggtgtctgttggcccctactgggaagtgtctcccagttaggctacacgggggtcagggacccacttgaggtggcagtctcttgttatcagagctcaaatcccatgctgggagaaccactgctctcttcagagctgtcagatagggacatttaagtctgtagaagtttctgctgcattttgttcagctatgccctgctcacagaggttgagtctatataggcagtaggccttgatgagctgaggtgggctctgcctagtttcagcttcccggctgctttgtttacctactcaagcctcagcaatggtggacaccccttaccccaccagtctgcagactggcaggtcgatctcagactgctgcgctagcagtgagcaaggctctgtgggcatggtacccgccaatccaggcatgggagagaatctcctggtctgccagttgataagaccatgggaaaagcacagtatttggccagaagtgtcctgtttttccaggtacagtttatcacagcttcttttggctaggaaagggaaatcccctgaccccttgcacttccgaggtgaggcaatgccccatcctgcttcggcttgccctctgtgggctgcacccactgtccagccagtccaaatgagatgaaccaggcacctcaggtggaaatgtagaaatcacccgtcttctgcgtcaatcataccgggagctgcagacaggagctgttcctatttggccatcttccaatcattacatcttaaagctccaaaataatctcctttgactctgtgtctcacatccaggccacactgatgcaaggggtgggttccgaaaggccttgggtgtctccacccctgtgtctctgcaaggtacaatcccttcagctgctttcacaggctagtgttgagtgcctaagggttttgcaggcaaacagtgcaagcggttagtcaatctcccattctggggtctggacgatagtggcctacttctcacagctccactaggcagtgtcccagtgggaaccctgtgtggggactccagtcccacatttcccatccacactgccctaatagaagttctccatgagggctctgcccctgcaatatccagacttctgtgtggatatcgacacatttccatacatcctctgaaatctaggaagagctcctaagcctcagctcttgccctgtgcccacctgcaggcttaaaaccatgtgaaagccaccaagacttacggtttgaaccttctagagcagcggcctgagacatatctgggcccttttacccacagctggagctggagtggctgggactcagagagcagtgtcccaaggttgtgtagggcagcagggccctgggcctggtctatgaaatcattcttcccttctagtcctctggggctgtgataggaggagctgccacaaagatctctaaaatgcattcaaggcatcttccccattgtcttggctatgaacattcagctccagcagctggcttgaattcctccccacaaaatggggctttcttttctaccacatgatcaggctgcacatattcccaacttttatgctctgctttccttttaaatataagttccagtttcagatcatttctgtgaatgcatataagcatatggttagaagcagccaggccacttcttgaacactttgctgcttagaaatttcttctgccagataccgtaaatcatctctttcaagttcaaagttccacagatttctagagcaggggcacaatgctgccagtctctttgtagaagcatagcaagagggacctttatttcagttcccaaaagattccttgtcttcgagaccacctcagcctggactttcctgttcatatcactatcagcattttggtcacaaccattcaacaagtctctaggaaattctatctttccatcatcctcctttcttcttctgatctctccaaactgtttcaacctctgtccattacccacttctaaacttgcttccacattttcaggtatctgtatagcaatgcctgacttcccattaccaattttctgtattagtttgttcttgcattgctataaagaactccctgagactgagcagtttataaagaaaacggctgtaattgactcacagttccacaggctgtacaggaagcctggatgagggggcctcaggaaacttaacaattgtgacagaaggtgaaggggaagcaggctcatctaacatggccagagaaggaggaggagaatgaagggggaagtactacacacttttaagcaaccaaatctcataagaagtcgcttactatcaccagagcagcaagggggaagtctgcctccgtgatccggtcacctcccatctggcccctcctccaacattagggattacaatttgacatgagattttggcagagacataattccaaaccatatgagataccatacaaacaccagaaaaaatatgttaatggttgtattaacattagccaaattagacttcaggacagtattgccagagataaagagggcatttcatgattataaagagtgaattcaacaagaagacatacaatctgaaatgtgtatggacctagtaatctttaaaattacgaagtcaaaattgacagaactaaataaataaacaaatccacaatagttgattttaccacttctagtaactgatacaacaactagacaaaaaaaaaatagtaaatatatagatgatttgaacaacactaccaatcatgttaacctgtttgacatgtatagtacactacagctaatacccaagtgtatattctttttatatgcccatggaacatttaccaagatagaccacatattgggccacaaaccgagtttcagtacagttaaaaggattgaaattcaacaggattggctgggcgcaatggctcacgcctataatcctcgcactttgggaagccgatgcaggcatatcacttgaggtcaggaatttgagacaagcctgaccaatatgatgaaaccccgcctctactaaagaaaaaaagtatacaaaaagtagctgggtgtgatggtgcgcacctgtaataccagctacttgggagactgggcacgagaatcgcttgaacctgggaggcggaggttgcagtgagctgaaattgtgctgctggactccagcctgggtgacagagtgagactctgtctcaaaaaaaaaaaaaaagaaatttaacagggtatgttctctgatcacagcagatttaagttacaattcagtaacacacgtatgtatatcacaaatgtttagaaattaaacaagtttcttttgaataagccatggatcaaaaaagaaaataaaagggaaattaacaagcatttttactgattgattgttaaagcataacataccaaatgtgggatgaagctatttcagtgcttagagattaatttatacctttaaatacttgtatataaatgaagaaatattcaaaatcaatgatctaagcttccaccttaagttctttaaagaaaaagaaggaaggaaataagagtggaaatcaatggacaagaaaatggacaaaaagtagagaaaataaataaaaccaaggatggatcttcaaaaaaattaatgaaattgatatacaacagctggccttatatgagagagacagagagagtactcagatgaccaatattaggaatcagaggagggaacctacagatactttttaaaaggtaatattgtaactaattttatgcctgtaattttaacaactcagtttaaatggataaattcttataagccaaaatatactaaaaccaatataagtagaaacagaaaatatggatatctgttagaggaattaatgttataatttattttttattttaaaaaatttaaggtgcttataatttaaaaatattgccattctttttgatgatcttattcttttattagaaagaatgtttggcctggcatggtggctcatgcctataataccagcacttcgagaggccagggtgggccccctaaaagtttaaggtcatcctgagcaaaatagtgggaccccatctctaccaaaaaaaaacgaccctcttcacaaggcatggtggcacacacctatagacccagctactttggaggctgacatgggagacaattctttgagccaaggaattcgaggataccgtgggcaacatagtgagacagtcccaaaagaaagagacagagagaggcagagaggcagagagagagagagagagagagagagaagggggaggagggaaggaggaaggagggagagagggaggaaggactactttggaattagagatgttaatgagaaaaataagccatttaaacaaaattttaactgatttattgggggtatagttcatatagaaaaagcctgcacatatttaattcatacagtttgataggtttaaacatatgcatacagctgtgaaaccatcaccacaatcaaagtcataaacatatccatcacctccaaaagtttcctcctatcacccccttttttgtggtaagaacacttgatatgtaccctcttcacaaaggttttggtgtataatatagtattaaaccaccattctattctctgcttctatgaatttgactattttagatactttttgtgagtaagatagtcagtatttgttcttctgggactagcttatttcacctagggtagtgtcctcaaggttcatccattttgttggaaatggcagggtttcctttttgaaggctgaataatattctattgtatgtatatgtcacattttcttaatgtatccttcaatgggtatttagattatttccatatcttggctactgtgaataatgctgtaatgaacgtgggagggcagataactttaattgcagtgattttatttcctctggctgcatacctagaagtgggattgctggatgatccagtagttctactttttaattttttggggaacctttatactgttttctatagaggctatactattttctgtagaggctggagcattttacattgctaccaacatgtgcagggattccagtttctccacatcttcaccaaaacttgttaactaaaaaaatctaaaaatttttgtaatagtcatcctaacaggtgtggttttgatttgcatttccctgatgattagtgatttttgagcacctttttacataaagagtgggccatttgtttgttttctttggagaaatgtctgttgaagtccttggttcattttttaaattaggttctttgttgcttgtattagtccgttttcacactatgataaagatactacctgagactgggtaatttataaacaaaggaggtttaactgactcacagttccacatggctggggaggcctcagtcatggcagaagatgaacaggaagcgggcaccttctccacaagatggtaggagacagaagagaaagtgaagggggaggaaccctttgtaaaactgtcagatctccagagaatgaactcactgtcatgagaacagcatgggggaaactgcccccgtgatccaatcacctcccaccagttccctcccttgacacgtggggattacggatcgagatgagatttgggtgggcaacagagccaaaccatattattgttggtggtgggtttttttgtttgtttgtttgttgttgttgttgttttcgagacacggtctcactctattatccaggttggagcgcagtggcacaatcatggcttattgcagcctcaaccttctaggctgaaatgatggcctacctcagcctccctagtagctgcaaacacaggtgcacaccatcacgcaccaccatttttattttattttattttttgtagtgacacactgttttgcccaggctggtctcagactcctggattcaagtgatcctcctgccttgccctcccaaagtgctgagatcacaggcatgagccactgtgcctgggagtttattttattttgttattgttgttgttgttgatgcttgttttttttttactattgggttatgggagttccttttgtatgtaattttgaagtttggagatcaactctttatcttatacatggtctgcaaatatttttcccattttgtacggtgccttttcactttgttgattgtttcttttgtcatatagctttttagttaaatgtagctgcacttgtcaatttttgctttcattgcctttgtttttggtgtcacccaaaaaatcattgtcattgtcaagaccaaagtcaagaagcttcttctctgttttcttctatgggttttacagtgtcgggtcttgtttgtgtctttaattcattttgagtttatttttgtgtttgttttaagataagggtcaatttctttcttttgcgtatggatatccagttttcccaagccatttgttgtttttttgttttgttttttgttttgttttgttttcagacagtctcactggaatgcagtggcacgatctcggctcaccgcaaccaccacctcccaggttcaaatgattctcctgcctcagcttcctgagtagctgggactacaggcacacgccaccatgcccagctaatttttgtatttttagtagagacagggtttcactacgttggccaggatggtctccatctcttgacttcattatctgcccacctcagcctcccaaagtgctaggattacaggtgtgagccactgcgcctggccaccatttgttgaagagactgtcctttcccctttgtgtatgcttggcacctgagtcaaagatcagtggactgtatttcttgggtttatttttgagctatctatttcatccgtctctgtctgtcttaattcctgtgtcatactgttttaattactgtagctttgtgatatatttggaaatcaggaactattatgcctctagctttgttcttctttctcaagatgcagggtcttttgtagttctgtatgaattttaggattatgtgttctatttctttaaaaagtaccattggaattttggtgagtgtaacattgaatttgtggattactttggatagtatggacattttaacaatattaagttcttccaatccatgaacacaggatgtctttccatttatttttgtcttgaaagaaggctatttgtaattgacaaatcaggattaggactctactgccatttccttattttttattttattttctataacttccctattaccaaatgttttagctagttacatttaccaaatatttacttcatttttgggatcacaggctacacatttgtttcaattagaaattctgctattttattataaggataactagataaatttgtgtggatcaatgctaattcattatgcttagaaaaaaactgaaaacatacggtgaaatatcttctgtgcaaaggacattattatgtgtggtcctctattttcctctttgtcatttatatcatcatttttatatagcccagaatgttttgaactgaatgtattcgccataaaaatgtctgttgagataacatattacagcaaaaacttggttcttgggcattcggccaaatggaaattgtggtcagaagttgaaggcagttttatatctttgagaaaacatgaagttcaaaaaaagtttttgtgaaaaactgttattgacaacacaaacgggaaactccaagttgaagttagtgctcaatagcaaattatggccaggcacggtggctcatgcctgttttcccagtgctttgggaggccgaggagggtggattgcctgaggtcaggagttcaagaccagcccggccaatatggtgaaacctcatctctgctaaaaatacaaaaatcagctgggcatcatggcgcatgcctgtaatcccaactactcaagagggtgaggcaggagaatcacttgaacctgggaggcagaggttgcagtgagccgagttcacaccattgtgctccagcctgggtgacaagagtgaaactctgtctcaaaaaaaaaaaaaagaaaagaaatagcaaattataattaaaatctacactttacatgcttagagggaaaaaagtgcaacacattaggtgcaatgcacatgttatttactctgtgcataagaattgtgcttgggcatctgaaaaagcctcaccccatttcctacattctgcaggtgctctgtgtatatttttagcattcatactcaatatattagatttatgtaatgtatatatatgcaagtgtatgtttatattatgttatagaagtaatataacttatgcaagatagtttttttaataaagagaaatgaaaatcagccataatttcatctcgataaaccaccactgataatatgcttttctgggatttcctatgtgtttttttttcttttgtatttttatggatagggggaaaaaacttacctacatacgcacacaaatttggcgtgatttttttctatacctatttctcaggcactttgctatgattgttaatgagatggccacagtacctaccctcaatgaaacttactgtctagtatggaccagtgtgaacaggtaactcataattattaccagtgtgctgagctttatggaagggaaaacaatgataccggagagtaaatacagggttgggggatcacttagtctaggaggtttaggagggacccctctgacaaagtgtatcatttaggatgcttttagcttcaagttatagacttgaagtagcaatgaaaactgccttcacaataagcacactgattagctttaatcataagaagcatagaagaaggttggtcattgcagcaggtgaaagaagtcatgcttgacccagcttctctgggattctcttggctttctctctgtggtcacagatacttacagcagttccaaagacatgatgatgtccagaggctgaaaagggagagctttttgctgagtatcttttttttttttttttttttgaaacagagtctcactctgtcgccaggctggagtgtagtggcacgatctcaactcactgcaacctctgcctcccggattcaaatgagtctcctgccgcagcctcccgagtagctgggactacaggcgcatgccaccacgcttggctaattttttgtagttttagtagagacagggtttcactgtgttagccaggatggtctcgatctcctgacctcatgatccgtctgcctcagcctcccaaagtgctaggattacaggcatgagccaccacgcccagcctttgctgagtatccctttaaaaaagtaaaaaacctttttccagaagactttggatctttttctcttgggccagaattgtgtaatgtgcatatttcctaccccattgttggtgaggaaaatggtgttaccctaaggcttagaggaatcaaaattcagcccctgggagagaggagttgctgtctatccctgacagacatagtcacccaatatttgaataaaattataattcttttagctaggaagaaggcaggacaccccatcagtggagcagtaagtaaattatgatacattcatacaacgaaatcctaatctactgtttaaaaagaggcaggtttatatgttgttatagataattcatttcagattatactaaatgaagcaagaaaaatgcagaacaaggccagacatggtggctcatgcctgtaatcccactactttgggaggccgaggagggtggatcacctgaggccaggagttcaaaaccagtctggccaacatggtgaaaccccatctctactaaaaatgcaaaattagccaggcatggtggtgggtgcctctaattacagctacttgggaggctgaggcaggagaatcacttgagtctgggaggcagaggttgcagtgagccgatattgtgccactgcactccagcctgggcaatagagtgagactccatttccaaaaaaaaaaaaaaaaaaaaaaaaaagcagaacattgtatataggaatatattatttgtgtaaaaccagaaaaatttttaataaaataaaattttaataataataaaatttcttatatgctggtatttttagaaaataattctggaaggacctaagaaactgtttactgtatttgctctgggggtgggacaaaggtaagacagagatttataatttactatatatccttttttactgtttgggttttttctccgtggccgtatatctacagtttatttttatatttattgattaaactatttgcataaagaaataaagtggaaagacataaaacatttaaattaaaatgccggaatactttctattcatatattgttttatgcttatgaaaatacttgtctaattcacttaactttttacacttttacagtgttattaaaatatatgcacagaaaacttgcgcaccaatgttcgtagcagcattattcataatagtcaaaaattagaaacagcacaaatgtccatcaactgataacaaaatgagatatacacatataatgaaatatcattcatcaataaaaaggaatgaagtattgatacaagttacaacttggatgaaccttgaaatcattatactaagtgaaagaagctgtattagcccattctcacactgctcataagatatgcctgagactgggtaatttttttaaattatcattattattattattttgagacagagtttcactcttgttgcccaggctggagtgcagtggcgcaatttcggctcactgcaacctccacctcctgggttcaagctgttctcctgtctcagcctcccaagtagctgggattacaggcgtgtgccaccacacccagctaattttgtatttttagtagagacgaggtttcaccctgttggccagaatggtctcgaactcctgacctcaggtgacctgcctgcctcggcctaccaaagtgctgggattacaggtgtgaaccactgcctccagccaagactgtgtaatttataaaggaaaaagttttaattgactcacagtttagcatggctgagaaggcctcagaaaacttacaatcatgatagaaggggaagcaaacacatccctcttcacatggcagcagcaagtagaagtgtcaagaaagaggtggaaaaccccttataaagccatcagatttttttttttatactttaagttctagggtacacgtacacaacgtgcaggtttgttacatatgtatacatgtgccatgttggtgtgctgcacccattaactcgtcatttgcattaggtacatctcctaatgctatccctcccccttccccctccccccaccccacgacaggccccagtgtgtgatgttccccttcccgtgtccaagtgttctcattattcaattcccacctgtgagtgagaacatgcggtgtttggttttctgtccctgtgatagtttgctcagaatgatggtttctagcttcatccatgtccctacaaggccattaactcatccttttttatggatgagtagtattccacagtgtatatctgccacattttcttaatccagtctatcattgatggacatttgggttggttccaagtctttgctattgtgaatagtgctgcaataaacatacgtgtgcatgtgtctttatagcagcatgatttataatcctttgggtatatacccagtaatgggatggctgggtcaaatggtatttctagttctagatccttgaggaatcgccacactgtcttccacaatggttgaactagtttacagtcccaccaacagtgtaaaagtgttcctatttctccatatcctctccagcacctgttgtttcttgactttttaatgatcgccattctaactggtgtgagatggtatctcattgtcgttttgatttgcatttatgcaaactctctgatggccagtgatgatgagcattttttcatgtgtcttttggctgcatatgtcttcttttgagaagtgtctgtgcatatcctttgcccactttttgatggagttgtttgatttttttttcttgtaaatttgtttaagttctttgtagattttggatattagccctttgtcagatgggtagattgtaaaaattttctcccattctgtaggttgcctgttcactctgatggtagtttcttttgctgtacagaagctctttagtttaattagctccaatttgtcaattttggcttttgttgccattgcttttggtgttttagtcatgaagtccttgcccatgcctatggcctgaatggtattgcctagcttttcttctagggtttttatggttttagctctaacatttaagtctttaatccatcttgaattaattttcgtataaggtgtaaggaagggatccagtttcagctttctacctatggctagccagttttcccagcatcatttattaaatagggaatcctttccccgtttcttgtttttgtcaggtttgtcaaagatcacatggttgtagatgtgtggtattatttccgagggctctattctgttccattggtctatatctctgttttggtaccagtaccatgctgttttggttactgtatccttgtagtatagtttgaagtcaggtagcatgatgcctccagctttgttcttttggcttaggattgtcttggcaatgcaggtaaagccatcagatcttattacaactcactcactatcacgaaaacagcatgcaggtaaccgcccccatgattcaattacctcccaccaggtccctcccactacacaaagggattatgcgaactacaattcaagatgagatttgggtggggacacagtcaaaccatatcagaagccaattacaaaagaccatatattgtatgattccacttacatgaaatgtccagaataggcaaatctatggagacagaaagtagattagtggtttcctgggaaggttgagggaaaatggggagtgtctgttaaaagacataaggtttcattttgtaatggtaaaaatgttctaaaattgtggtgatggttgcacattctctgaatatattaaaaaccattgaattgtatacttcaaagggatgagtgtatgctatgtgaattatagctagtaaagctattttaaagatgtatctgtattgtttgttcccacaaccactggcagaattttcaagaatattgcttcagtttctttatgaacacaatagaatcatatacttaccaacacctttgttctttttggaaaactggatattttttggcaacttttttcctctgttgttttatgcatttatagactaacatagttatcctttttttcaataagtctgtcactgatatttttattttttttctgcttttgcctttccttaaaatatcatcttataaactctattttttgtgagcatagttttacttctatcttcaataaatttaaaaaatcttgtgaaagaatttgcacatagttttaaaatgagatagtataaaagggcttataatgaaaaacaacaaattctggtgttctgtcctccctcctattcctgctacccactttttaactgtttctgtttgttactctgatcatatttcccatattattaaaaagctcatgcatgcatgttccaagttgatttccaactgtgatagatgaataaatagccaacttatgtttggctgttcataggattcttgggtgaacataaatttgaagacattgctttatcatcttttacaattgtattttgtattcctgttgaaagatatacttgttccttttttctccctctttccttctctttctctgaaaaatttaataattatctttacgcccgtgttttaaaatttcacagttatatgccttgtatgtacagtttttaaaatccattgtgtttggcctttggtaagtgaattagtccattctgatgctgctagtaaagacgtacccaagactggataatttataaaggaaagaggtttaatggactcacagttccacatggctggggaggcctcacaatcatggcggaaggcaaaggagaagcaaaggcatatcatacatggtagcaggcaagagagtgtgtgcagggaaactcccatttttaaaaccatcagatctcctgagacttattcattaccaggagaacagtatgggggaaactacccccatgattcaattatctccacctagccctgccgttgacacatttggattattacaattcaggtgaaatttgggtagggacacagtcaaaccatatcagtaagcatttcagtctaatgaatactgtttctcttcaactctggaaattgtgtgaataatttcttcaataattttcttccctctgtttgtattatcatttggggattccaactagttgaatggaaggtcacctagagtgattttctgttcttctcaatcagaattcctcatgtgaaccacagactcagaaaatggtttgactaacttttttctcacatcttccaaggctagtcttaaccagtaccattctagatacatgagagaaattaatagataacatacagtgattgtctaggacgagggtcagtgaactttttcttaaagggacagatagtaaatattttcggtgttgtaggttgggaggcaaaatcaaggctatggtgtaggtatttatatacctatctgaaatgtaaccatttaaaaatataaaaaatattcttatcttgtgagccattaaattaaaaagtagatggctagctggatttagcacacaagccataatttgcccagcctctttttttagggcattaggggttaattctttcactgactctgttcagaaaatcctcttttttattttcactcatttcccttcaacttagttttttattttacctttggggagatttccacaaatttttcttaaagcacttctattttaattcaacagtcgtttttcattccagcacttcttttttgttttccagttcccttttttagtatcttgtttttgttttatggatgcaagacattcctaaatgtttctaaggatactccttatagtttttaaaactcttttcttttgtttcctaaattatctctttttcctttgaggacagtttttctaatttgtacgttcgtgatctctggtaatctatcatacttaacagtgataaaacagaaaaatcatctgttgtttctctaggtaaaatgcataaacatttaacaattatatgttacaattttagttaccatttatattttatatattaaaactgatgcttacaggaacagaaaaccaaccaccacatgttctcacttataagtggaagttaaacgtgagtacacatggatacaaagacaggaacaatagacaccgcggcctgcttgagggtagaggagaggaggagggtgaggatagaaaagctgcctgttgggtactatgcttattacctgggatgaaataatatgtaccaaaaaaacccataccacacagtttatctatagaaccaacttgtacatgtactcccaaaactaaaataaatttttttaaaaaaggaaaaaaatctgatgcttatattttcattaaatctcctcctgaaatcagacataaagagaaaatctctaataagagggtgtgtgtgcgtgcgtgctcgtgcatgtgtgtacatgtaccatctggaggctaaggtggtatttgagacattctgtcattagggcagttgcccctgttgctttgacactctgttctttcggtggttttcagcttcctctgccctccatcatcacttccatccctgcttcatctgtctgctaggtaactgttgaaattactcagctgctgatggccctctcatcttctttgctgtaatggttttatatcttttacaaactattacctatgatttaaatagactctcccaagagagaagatagctgtttatgttcatgttttaattagtatttttaatttttaattagtattctcactacacattttaaactatatttttgcatttattatatgcttctgaaatacaaaaagcaacatgaataagtcatttgtgatgtttataactcagtagggagatatcacacatatgccaaattaactttaataaaaggaaaaaatgtagtaaatctgatcaactactttgaaaatagaggagtggtagtgaatggggaggtcaggctctagggagaggttggcatttgagctgggcttgaatgatgagcacagtgtagacatgtagagtggagaaggtgttgcaagtggatagaccttaacatgctcagaagtacaaatcagaaaatgcaagaagcaattagtagtgagtttccagtgtgattacagtatagggtagatgcatatttggttgggcagggggacatttgtaggacacaaggccagaaagggaaattggactcagatcatgaaggatcattccatactcaggcttttggattttgttatttagaccattggggacaacttttaagtagggtgtaaagatggcttaaatgtcttctaggtaagtccgattacagtacgaaagatagattaaaaagataagataggccaggcgtgatggctcacgcctgtaatcccagcactttgggaggccgaggtgggtggatcacctgaggtcaggggttcgagaccagcctggccaacacggtgaaaccctgtctctactaaaaaaatacaaaaattagccaggcctggtggcacgcccctgtagtcccagctacttgggaggtcgaggcaggagaatcgcttgaacccaggagacggaggttgcactgagttgggattgcaccactgtactccagccagggtgacagagtgagaagggaaaaaaaaagatagttgaggtagtgaatcctgttataagctattaattacagtctgaaccaggacagcagattagtttcttagcaatattcattaaacatctgcagtgtctgctagatattttgatagacattgatactttggaggtttttcctcaaaatggtttctatagccctgtctccctccctactccaactggggccatcctaagcaaagctctgctgactccctgcctgagttactagggctccagctcctgtagacaccagggtctgtctccagtccaattcattttgtgcaccactgacaaaataatcttcagatgtgacctaaattatgtcatttctccttttaaaactgctttgatccccctaccaatcaagtcttaactcttcttctggatgtcagtgtccccatcctggctctaccctaactaaccaaacttttcttgccagtgtctaatgcaaaaatattcttgtgaggccatgacgggaggaacacttgagcccaggagttcaagatcagcctaggcaacacagtgagaccttgtctctgcaaaaatttttaaaaaattagccgagcatggtagtgcatgcctgtagaccctcaggaggctgaggtgggaggattgcttgagcctggttgcactgagctgtgatcgcaccactgcattccagcctgggtgacagagtgagactctatctcaaaaaaaaaagaatcttgtcgtctttgtctgtctcatttccttagagcacgctcattctgcccccatgccttcttttctcatgtgaccttgctgtgcatgttctctataccttctcatttaaattcttcccaactttcaagtcttagctcagttacatctcctcaaaagttcttctacatcttctttgaaaaaaaatcatcttacactgtttttctttttctttctttcttttttttttttttttttttttgagacgtagtctcactctgttgcccaggctggacagtgcggcggcacgatcttggttcactgcaacctctgtcccccaggttcaagcgattctcctgcctcagcctcccaactagctggggttacaggtgcctgccgccacacccagctaacttttgtatttttagtagagacagggtttcaccctgttggccaggctggtttcagactcctgaactcaagtgatctgccttccttgacctccttaagtgctgggattacaggcgtgagccaccatgcccaccctttttttggggggtgtggtggaggggaggggacaggtttgcactctgttatctaggctggagtgcagtggcacgatctcggctcactgcaacctccgcctcccaggttcaaacgattctcgtgcctcagcctcctgagtagctgggactataggcatgtgccatgatgcccagctaatttttgttatttttgtagagatggtctccctatgatgcccaggctggtctccaactcctgggctcaagtgatcctcccacctcagcctaggagtgctgggatgacaggtgtgaaccagcacatccggccgtcttaacactatttttccctccccatgttgtctagccttatgtttggcatgtctatcctcagttactccatggtcacaatacggctgcaggagtgccagctatcctaacaacatttcagacaggaaagataaatgcaaggggcaaaagggacatctctcccagctgagtcagccacctctgaaaagctctcctgaggagtgactggcactaggttggcttcattggttgcccgtaggtacaagggatacatttctagatagacatattcagggtctccatgttaaacaattccataggacaccattcacaaaaaaacaatatatagaatagaacagagtattcaatatctttatctgggtttgatacatatacgtatgtatcatatacatgtacagtatgtatatgtatttttacatacgtatatgtattttacatactgtatatgtatatgatacatacgtatatgtattttacatactgtatatgtatatgatacatatgtatatgtatttttacatatacatactgtatgatacagtatgtatatgtaaaaagttatcaagctatatagttaagattagtatacttttttcttcctcatcccaacattagtatactttatacttcattgaatatgtgttgtacttcagttttcaaaaattagtggtttcctcaagaggtgtgcagtgtgatgagcctgggaacgtggctgtaggtaaaactaggattatgttctcagagggaaaagtagacactgagttaggtatctagatatctttgtcacaagcataggacttttttctatcaatagttttgacatgtacaccaatgttttaagatatcacagtgttcaatataatatatatagtaggcgatttttattttgatatcgaaacattcccacaagaatgaaagcattggctttgaaaaacaaaatattgcttgtaatttttattcatgtgctacaaagcttaaaccttaagtgaaaacgcagtgtatacttttgactgctatgtactttatatagtaaaagcaacatgtaattttattaagtcaataataaaaggattcacaacactagtttctgaaaaatgtccactttgggtggctctaaactgattaataaaaagcaagtaaataaaactgatcataaggtgtcaaaatctaatctgtatttataagcgtttgcaaacatttaagtaatcttttgaaattttcttttacttcctttcgttctgttagaaaaatctgaaaaataaacaaccagattcactttgttgttgttgtgaaactactagaaaatgagtgacacatgactagtctgctcttatttcatgtaattttaaaatgcattccaaataatcggaattagaaaatggcaacttctttttgtttgtttgttttgttttgtttttcttgagatggagtctctctatgtcgcccaggctggagtgcaatggcacagtcttggctcactgcagtcaccacctcccaggttgaagcgattttcctgcctcagcatcccaagtagctgggactacaggcacatgccaccatacctggctcatttttgtatttttagtagagacgaggtttcaccatgttggccaggctcgtctcgaactcctgacatcaggcgatccacccacctcggcctcccaaagtgctgggattacaggcatgagccaccatgcccgaccaaatggcagcatctttaagcatttatttctgagtatctgtgggttgatgtttacttgtttttaaataaagattgtgtttttcttaggttcatcctcagcagcaccggcttctttttgaagtgtttgacgaaaaccgattggtaagttatattgtgcttatatgaaatatgaagtaagggtacatttcagtggagcagccaggggaagtgggtaagcagtctgggatttgagtgatggcttgggggtggttatggagactctgggcaaaatggtgagggagatagaatttgttttcttcctcctggtcctactcgctccctttccattctcctcccaagcacctcttctgattgccaacatattataaggtcttactcaagacctcttgtgacaggagaggacagaaaaccaacctctttgtcctgccttccctctcactcgcccatgacccctggttcctactccatggctctgggaatcttcccagggtatccttcagttgcgcctcctcactacagtggcctttcttagggttacctgtatccaatggacatcctatccactctctcatccccactcttctacagaggaaatctgtcctttttacactgataaggaatgagcaaataaagtcttctcaaagatggccagctcttacagaagcaaaaagcaaagttaaacctgatgttctttttataaaatgattgttctgatttctgaattcctaaagactctcttaaagtcctatccttttcctaattttgtctctgaggatccaatctcaaaccctcatcttagcatcttacatctatattttaaacctgtaagatttgaacaggtaagtatagaaacagtgttatgtgtgcaaagcttatcagttacaagcaccagaaaaattaaacagttttgttcattttttagctaacagagaaactagctttttttttaaaaaaaagtctgtttttagtgttaaactacattcatgttttttttgccctcaagaaatggtaattatactggcaactaaagatattgccaatgaaatctttaataaacatcatactaagcaaaagtacattattgctgccaaagaagactatcactgacttgctatatatatatatatttttttttttttttgagatggagtctcgctttgtcgccaggtgggagcacagtggctcagtctcaactcactgcaacctccgcctccagggttcatgcagttcccctgccttagcctccctagtagctgggaccacaggcgctcaccaccacacctggctaatttttgtgaattttagtagagatggggtttcaccatgttggccaggatggtcctgatctcctgatctcgtgatccgcctgcctctgactcccaaagtgctgggattacaggcatgagctgccatgcccagcctggccatctaatttttaaggctaagtgacagatgttgctgatttgattatcagatatggttagttacagagctatttgttttctgtctgtgtttttgcttgtttaaaagaatataaaatgttttcctttttttcccctctgaatctatagacctgttttcctttatttattattattattttttgacagaatctcactctgttgcctaggctggagtgcagtggcgcagtctcagctcactgcaacctctgcctcccaggttcaagctattctcctgcctcagccttccaagtagctgggattacaggcacccgcctccttgcccagcttatttttgtatttttagtagagacggggtttcaccatgttggccaggctggtcccttctagatggaaacaaattaaactttgtattggtggagtttttgtgtgtgttttgtttttaactcatgaaatatacatacaaaaaagcccacataatataaatattttaaataataagacaaatatgtatacacgttactcagcttaagaactagaacattaccaaaatctttgaaaccctccctagatccctccttagtagcatcttcttttcttcctccacaagtactagccactgtcctcaattttgtttttatcattctttgctttttaaaatacttttatcacatgtatatatatccccaaaaaacacattgttggccgggcatggttgcttatgcctgtaatcccagcactttgggaggccgagttaggtggatcacctgaggtcaggagttcaagaccaggctggccaacgtggtgaaactctgtctgtaataaaaatacaaaaattagttaggcgtgatggtgggcacctgtagtcccagctacttgggaggctgagttgggagacttgcccgaacccaggaggtggaggttgcagtgagccaagataacaccattgcacttcagcctaggtgacaagagcgaaactctgtctccaaaaaagcaaaaacccacattgtttattttgcatattttttaatttgtaaaaatagtatatctctatagacattcctctgatatgcttttttgcttaacattatatttgtgagatctgtgattacacatttcaatgatgcataattttctatattctgaaaaatcataatgctataatttatgtatttaacctccttaatagatattagtgttatttccagtattttgctcttacaaattgataaacatttttatgtctccctatgtacgtgtctgagtctatctctaagagatatgttttagagttgaattgctagatcatggtattactgttatttttcctgttgccactgataccgatgtgaattttgcctgatcattgagtgtattattggtgaactattttatttgcgttatttgcatgttgtccacaaggagggacagctcacatttgtgctttccaccatgcttaattgtctggtccattttgccagtaactttagtatttgcgtgactctttcttaatggccagaatggctgtttgtcaaacactaatcagtgaattaacattccttaagcatttactgtgtatataatactataaagtgtgtcatgataggttggaagaaaaaagtattgcctttgatattaacagttggatatttatagatggataaatatgacaaaatttttaaaacttttaaccatatgaaaaaacaaataacacattaatcaaaatattgtaacacctgtaatcccagcactttgggaggctgaggcgggtggatcaggaggtgttcctgaggttaggtgaacacctgatgtcaggagttcgacaccagcctggccagcatggtgaaactgcgtctctactaaaaatacaaaatttagccaggcctgatggtgcgcacctgtagtcccggctactctggagactgaggcatgagaattgcttgagcccaggaggtggaggttgcagtgagctgagatcacaccattgcattccagcctaggcaacagagtgagactccgtctcggcgaaaaaaaaaaaaagttattatagatccccacactaaggactaagaaattctattataatcctgcctttcttttggggtattagcttgtaaccctaaacaaattattcaatccttctaaaaataccttctcacatttaaaaaatgaggacaacaatatttgccctgcctatctcataagcatattgtgaggataaaatgagacaatgacgatgaaaatacttggaaaattctttatcatgatacaaatataaaatgtcatttaacattcgtagacttaacgcgtttgtagctctctgatatggtatatcttgtgttagctaagatataccatttagtatatctactgtgttagatgctcttctatgagtgggaaatacagcttttcttgagaaactcggtttaccagcaaaacaaagagccaaagataattagaacatggtggtgtgtgtcattctagtcctcttgatttgttgctagtcttagcaggtaagggaggtatagagatgacctgagatgttatagaacctatagccattggtggagtaacagacctgattgtatagcaacaaatgacctgtgtcattataaatgtcattccgtctttattctgctgaggcactcacaactaaatttaaaatgtaccattttcctagcaaattctcttggaaaatggagggtgaagaacacaagtataatattaagcagaaacaactttagtcatctggaaaacgtttgtaatgtaagtgatatttgctttcaataaagagtaggcttatatcacttttttccagccaattttaagacttgagtgttataaaatattgtcgtttcattatggtgatggtggtggtagtggtggcaataatgacagaacatttcagaatgatgtgtcttaaaaaaactctacccaccaatgcaaaagttagcactgtgtcaccagtctaagatatacacctgtacacattcagccaccggttttaggagccacctatattctgggtggagaccctgtgcttctcacgtttagcagttgtattagtgaaggttctccagagaaacagaaacaatagattgtgtatatattttatgtattatttatttttcatatattttatatatgaaattatgtataatatatgaatatatatatttccacacaatatatatatagtgaagacttcaatctgaaatctgcagggcaggccaggaagctgagaacttaggcagggattctacattgtagtcttgaggcagaattgctgcttcttacacaacctgtgtttgctttcaaagccctcagctgattggatgagacccacacacattgtggagggtaatgtgctctactcagagtctactgatttaaatgctaatcatgtctaaatgtcttcatagcaatgtctatactgatgtttgaccaaacaagtgggtaccataacctatcgaagttgatacatacaattaaccaccgcagctgactttggccttcaaagttcagtcaatgattaagattacccagagcctatccataccatgtagataatcacattattttccatgtagatgatcagtaaccaacagctctgaatgtgaggttcttagcttcaatcctaagacgttatctgtttcattccggaatatgaaattctatgtaggacttgcatggattctttccagatgagggctgccatgtccctccagttcttctacacttaaggttaggattaacactcctgttttggtatttgctggactgagagactacattttatagcaagttccccgatttcccatgtaactgctataatagcagtatagatcctatgcaatttcagacctcagccagcaatgcaaattgttcagcctccctagaatttaaactcagactagagtgctaggaagtgcatgtgattctcttaccttacatttccttggctgaaaccctctctgtaaatttttcaaacgtcattctttcttgtccacctgcagtgctttttgatatttctttaaaagtggcggctggatcaacttcaacaacaacaagaaaaatcctgaaagaaagcattaggcattcagagtgactgtgatgacaccatccatctctccatccagacttctatctggtgtcttctggtacttactttgagcccaggatgagctcaggagcatcagaagaaatgtgtagttatggcccatgctctctggaaagttaaaatctagttaggggacatggaactgatgcttatagtgaagcttaccaaagagaagacatttatctgaccaaatacttggagttcattattttatatgttaataatgagaggagcttttcttatttcctggaagttttaggccacagacatgaacaattagatctcattgattagcctattagaagggattcattctttgagttattagaccccacacttaatcccagaaagaacgctgaagtcatttgaaggcagagtaaaacaggactcctccttatttaaaagaaaaagatgttaagagaatattgactgaagtctgtaaaatcataaaggaggtggtttatacaaaagcaaaaataacataataattgtattactaagttttcaactattgtacgcattcaaaaacagggctgtttcattctagtcaaatgaaatgcaatgaattcccataattctgttttgtgtcttaattgattaaaaatctgtttagaaaattctgatcaaaaacagatctatcttaagcagttttttttttttaacaaagtatgagtatatgttttacatatttgcttttacttaggaaaaaaaacttacttagcaaaatacaacttgggtgtagtagcatgtggtataaacaacggaactattttaccttttactttcctatgaatgagccagtatatatttattactggagttccagctataaaatttaggtgaggggtttaaatataccctagagtattatttaaaaataaatttgtttctttcaaatagaataccaaccttggtctatggcatttgagagagaaattaaaatattaaattttgattgcctagtaaactgaaaataaaggttaaataaatacaaagcagaaaaaatatatatacaaaatcacaacctctaaaaggacaaacagtccactgttctctactgtgggagctttatcagcactggtgagtaattccacctctagggtagggctagctctcaaaaatgtaaacaagtatgtactttgtttatataaagaaatgtgcagcttggtttgtatttctttatagatatcaaacagctaaatggattgtttcaaagtaccagcaggggccagcaaagagctcttagagtttttcagaacagaattggcattgagacatgtttatttgatgtgctaaatcctttttagacttctttacttaccacaacactctcttaagtgaatgaattgcagagacagtggaataaaatatcctgtgtgttcaaactatcttggggtatagttttttttttctaatctgcatatatttttattggaatgtttgcttaggctatttcttggcagttttaatagtcaaaatataaatggcatcatttaaagactgttctacttggctggaaaaggccttaaaattacaggagaaaatgcttagtgacagcttctcttaaactttttttcttgaacctatgcttcagttttgcaatggtattactaggttaattttgtagttctgtccttaagctttcactttttatgtaactagcactttggaagctaaaatatgtatctatttgatgtagtgctaaagttttaattcattgtaaagttttggtatttccaaatttacctaactgtttgaattcacacattaaaaaaaaaaaattaacagtccctatattaactaacttgactagattcctagtatggctactatttggaaattcaatctttgatttgatgcttaattacatggggttttgttcctaccaacttcctgtaattctatacctatgggtaaaaatattagtgggcaaagtcggctggagaaagtataggcactgtgattcacatagttaaatgttcatttagtagagctggggtgaaaaaatactgtttcaacttgaaatgttagaagattgttgttcttgtgttactcattcatgcaaattggagaaggtataattgaaacaaggttggctgtgtttgagtcagtgtgctgcagctgagctcagcttaaaggtcgctggaaatcaagtgctttgtaagtgaaggcattttgactacaagcgattcaagacattttggaaacgtcagtctctggaatgggtcgtctttttctttctatgatatctggtatctaatgttttacttaggataaagactactacttaatagctcttttaggcaccacaaatgattttttcttttgatgcagtgcagctgcttctagcctgtctacggacagagatctttgttatgactttcagcccttaacatgtttggaaatgagaacaaatggcacaaagcttacgattgcactttgcagccagaagaagcaatacttaccctttgtcagaaacctccggagatgacttggatagccatgttcacgtgtgcttcaaaagaccaacacggatttcaacgtctaacgttgttcaaatgaagctgactcccagacagactgcactagctccgttaataaaggaaaacgttcagtctcaagaaagatcatctgttccctcatctgaaaatgttaataaaaagagcagctgtctacagatttcactacagccaacaaggtacagtggatatcttcagtctagcaatgtcttagctgatagtgatgatgcttcgtttacttgtatcttgaaggatggtatttacagtagtgctgtggtcgataatgaattgaatgctgtgaatgatggtcaccttgtaagcagtccagccatttgtagtggtagccttagtaacttttcaaccagtgataatgggtcttacagcagcaacggtagtgattttgggtcatgtgcaagtatcacaagtggaggttcatatactaacagtgtcatcagtgacagtagtagttatacttttccaccaagtgatgatacttttttgggtggaaacttaccttctgacagcacctccaatagaagtgtgccaaacaggaatactactccttgtgaaattttttcaagaagtacaagtacagatccttttgtccaggatgacttggaacatggattagagattatgaaattgccagtgagcaggaacacaaaaattccactaaaacgttactcctccttagtcatttttcctaggagtccttcaactacccgaccgacttctccaacaagtctgtgtactcttctgagcaaaggatcctatcaaacttcacaccagtttattatttctcctagtgaaattgcacataatgaggatggcactagtgctaaaggatttctttcaacagctgtcaatggacttcggttatctaaaacaatttgtacccccggagaagtaagagacatacggccgcttcacaggaagggctcgttacagaagaaaattgttctttcgaataatactcccagacagactgtctgtgaaaagtcatctgaaggatattcttgtgtttcagtgcatttcacccaacgaaaagcagctacattagactgtgaaacaacaaatggtgattgtaaaccagaaatgtcagaaattaagcttaattctgattcagagtatattaagctcatgcataggacatctgcatgtttgccatcctcccaaaatgtagattgtcaaataaatatcaatggagaattggaaagaccacattcacagatgaacaaaaaccatggtattttacgaagaagtatttcattgggaggagcttatccaaatatttcctgtctatccagccttaagcacaattgttctaaagggggaccatctcagttactcataaagtttgcatctggaaatgaaggtaaagtggataatttatcaagagacagcaacagagattgcacaaatgaactgtctaattcttgcaaggtaagtttcctttggtcttggtaaatgttaatttatatgagaataacttaatgaaatatttggagaacatttattgtaaccaagcagttttacatattttcctggtccttagctagcagtattttgtagtcataaattttatatttgtaaatctgaagaactctatgtatagttttttactctatttgttattttaccagtgtacaaaatgtatatttttaaaaatcttcctaagtgatttaagctataaaacttttctacaacataaaaaactttctacaacaaaacaaactttgaataacagtctatttcataacattttatcttggcatatttttcctttaaatgatatagtattcttttgtgtagctcaatactttattcctattttcaaatgatcattttgttttctcctcttcttaatcattatgaaatagagtaaaatttagaatgcttatttaaaatattaaacaaaaacccatatcaaagtgtaaagatctttttataaattatcatagagaaactatatctcaaatacatgtgtttataagatcattcataaaaactattatgctgcatgtttaaagcagaggaaaaataaatggcatttgtatttgtatatacccttaaccacaggaattttgtttccaccctatttttctttagccacgagttaatactgccctctaaaatgtaactcactctttcaacaatattgaattctaagttttaatatttttgaatttggtttaaattgctaggcatttaccacaattttctatttaccttttcatttttttgacaattcagctttattatattagtaatttaactcttatgaatcttagccaaaagttctttatgtaatttggccgttccaaagtatttaaaatggtttgaactgaaatagattttttaaatttctgtatttggaatgttttaccagattccaggaaatttaaaaaattttctaactaaagcaattttacatgacagtacatcatagttttggggggaaaaaaccttaatctgtgtttttgtaacatccattatgtttattaaagattgttttaaaaaaaaaaacttctggataagtaactttaggtgaataaaatagtaattgctagtttattttctctcttctgaaatctggtaaatataataattgttaccaatgcccagatgttaatataagccactactttactaaggataaaaaaagatcagatttcaaattctgatctataatttagaattttaaattccatttaggaaacttttctaaaaccagattttaggagattataatctaatcaactgtttttcttcctgaaagaaagaaatgaagtggcactgagaagaaacgttaatagtatgctagttgaattaatgttacttataaatttattttacacttaatgaaataatctgaaaggaataattcatgtagaaatatttgtagaaataccttaaaatagtttattttgtggtaataattatagtttgttgtggatgcttttgagaagagtattttaaatgtgttttttaatgaaatgtggatcaaatgccttttgcattgttaaaaatatccactgttactggttttatttatgcttaggtaagctaacttaaatattttttgtgacaatcaaatgtataactttgtgcagattctatcttttggtagattattggattataaaataattcagaagtgtgcagtttgctggagatttaaattgtccccccgtttaatgtttattagacttctctttataaaagcattgtaaaccatatagtgacagttaaatttaatttatgctatatctaaatagatctaattgataaatcaaaggcttgttttatggagaagattctagtgttgttttttctaaatatagcagtggcaacaataatgggttttagaaataatcttgtgtttatcaataattatatattaatctaattatagtggtatattgtaactcacttataaataaacagctcccaaaatatttcccatgactccagttagtctgggttagtattctgatatgctgagtccggattcacatttaacaagttgatattagagtagcatttagtaatgtcagctatctgtactgagcagccgtgaaattaaatcactgctttggtcagagaacctggtttctaaagcactgagagtctacaacttcttttcttatatgtttagctaccagtctctagcagtataaaattgagtttctagcttactgtaatcaacagcttattaatgactgattttttaaatctaatgagaacttttacctgtatctgggacactgtctgtgttctgtgtttacaacttagagtgaagatgagactttgtagtctatctccataataatgttgatttcaggcatagcaaacaacataacagtgactggcatatgtttattacatatgccttttgaaatacagtattacttttgtaaaggctatataatgacttttgatctgaaaataaatacttgatattttaacagtatgtgtaatattttgtcagttcaatcaagaagcaggttaaggagctaaggtactatgtatacagttacaacaatgattgctattcagatttctaaatctgtatagtagttacttttctctactgttattttgtttcccccatctgttgttttctaaatctcctatgttatgttgttaggatgctcagagatttcagtaccctattatttaatgtgcattagcatttttcccaagcttgaatgtcttccattctttacttatattcatatttttattagaattattttttacattttttctttttgttataaaagtttttgttcattatatgtaacttaatcctaaataggtaaattgcttaagcctagtatagtagaactgtaataaacttatgtcttaattatttcaaagcctttaacactaatctcaagattatacatttcaatattttcttattttattgttcttcctaaaatagatgttttaaatatatacttactttaatgttccattattttccagtccttattttactaaatttagcagaatatttagagagatttggttaaatttattttgagcagcacttatataaaccaatgtaatttataaatattctaaaatgtgatgccacaatgttaatgactagttttagaaagttggtgaaaaatgtatatttgtacatgtatatttcttagaactgaggaattgttaatttcagacagattcagagtgctgaattgtttgcttgaaaacattttgtattctctgtagatgtgtcttgtttaattcatccagtacacatttgagtgccaggcactgtcccaagcactgagaataaaagatgagtaaaatacagtctctatttaggggagctcccattctagtaatagggacatgcttgtaaacataaaaattttcagtctaggccgggcgcggtggctcacgcctgtaatcccagcactttgggaggccgagacgggcggatcacgaggtcaggagatcgagaccatcctggctaacacggtgaaaccccgtctctactaaaaatacaaaaattagccgggcatggtggcgcgcgcctgtagtcccagctacacgggaggctgaggcaggagaatggcgtggacccgggaggcagagcttgcagtgagtcgagatcgcgccactgcactccagcctgggccacagagcgaaaccccgtctcaaaaaaaaaaaaattttttttcagtctaatatgtgatgtgctaaatagaggtgtgtatgaaaaagtagaaagatgtgacattatttatctggagagaggacctggttggtagaggaaggtttcccagaggaggtgacatttgaaccgagtcttgataggtaaactggagttcatcaggcagagaaatcaaagagattctagggcagggattccccatctcagcattattatattgggctggacacttttgtagtgggggctatcctgtgcactgtaggatatttaacagcatccctggcctccacccactaaatgctagtaacacccctttctcccagtgtgacaatcaaaaagtgtccccagacattgccagatgtcccctaggggcaaaattgtcccctgttgagagtcactgctgtaggtggcagcagcagcatatgcaaggctagaaatgtgaaagaatctccactgtaaatagtccagtggggctcaagcatagggtagcctggggatgtgggaggcggtgatctgccagaagtgggtcagagtccgattaggcctggtgcttcatgctgaagacaaagaagggggtcttcggctgatagttaagtagttgggcaatggaggtctttatttgagagtgtgaagtgctctctttaaggtttttagaagacaatttttcatggtttcatggattataaatgaattaaagttttcctaacttggatgactgggttaacagtgatgttatgaactaagatggagaattcaggagaggggccagattgggagggtgaagaagaaatcatgtatgaagtttatgtgtatcagaggctgccctgatagtgctgttttcaagtagggcagttggacatacaggaccaaggctcaggagagaagtgagagttggaaatgtagattgggagtcaggagtatagtcaaagcctcagataaggatgaacacgttagggaaggtatacagtgagatgggaagggaagataaattataattttggggaccaccaactttggtgaggcggtagaagaggggataaagaagagactaaggaggaaccacacagaggccaagagagcatggaggcatggagagcatggaggcgtggaggcatagaggcatgggtgaaaggtgagggaaggaggaaagcagacagtaccacagagaacataagtatccactggatgtgtcagttaggaggtccattagcaagagtaggctcaggagaatgcggggttaaaagccagattgaagaaagaatcaaacaggtaaggaagcagaaacagccagcataggttgcttgctcgatgtcataaaataagcatgagatagcataggcaaggtatatatgtagttattgttatacagaaggcatatgtgaagtggatataagatgtataagacaaactccctctctacagggagagtacagtctctttttcctggagaaaaaaataaaggttacagtcttacgttctttcaccttggaactatagaataagcaagtatgatgagtgaaaactgaaatggaaattcagcaatatcaaatgaaggaaacagaaaattataagtgaaaacttgaaatcgcttatgaatattcacacctcattttggacagcattagtctaactttctcagtcccctctctaccaccaaaaataagacgaaacaaaatagagcttccatgtagaaaacaagtcaaggttttaaggcctattcccagaaactacttggataataggcaattctgtctatgttgccggcttcttacaggctatggagcctaccatgtgctagctgttgtgaggcctcacccgtttgtgtccactctccctttacatcacaggtgacagggaaacaagacagaccaggagaagccaggacaagaggctttgtaggctgaaggggcttggcagagtctctgggtgaggccaggcgatgtgttgaggtcaggaaggtggttagcagaaggagcaaatgaatgctgagaaagggaaccagttgtcttgtcagcataccctggaaataatccaaagtattgctcacacgtctggttcagtatcctctgttccttgtgtaaaattgggagaccatggtcagatgaagacagatacttagagatacagtaatttcaaaacaagagatgagcagatctgtcccagttcaatgagatgttttgggaaggactcaacatgggagcaactgttgaaaagcaattttacccacactaagattgaagcgaactgttgggatagaacaagagcagcagacctgagggcttagacgagcaaccagctagtgtgtatgtgcaccttgtagctcgattcatgggtgagtcacaacaaagaacaccttgaacaagtaagtaaattcatggcatttctagttaggcccgaggatgtctgttggtgaagaaagagcgtaggccttctcttgacttagaggtattataaaaccataacactaggaaacattttgattaccttagtagaaaaatacattacccaagcaagatattgatgatatagtagacaatgtctttaaattcagttataactaaacttagttaagtatagttatacctgaagttaagtacagatatacctaaaataatattatccaggattgcttccttttatttactttttatctcaattgtttttttatgatgaggtctcattatgttacacaagctggatttgaactcctgggctaaagcaatcctcttgcctcagcttcctgtgtagctgggactacaggtgcactgctgtgtccgactcacaggctaccctctaatgctttattaaggaattagagaatggcttattaagatgtcagctgggccagtgatttttaaattctcatgtgcatgtaaataacatggcgatcttattaaaatgcagattctggttctggttcagtaggtctcagaatgggggcctgagatttctgtatttataacagatcgtaccaatgctggtaattccccagacacactttgagaagtaagtcttaaggccattctttgatgagaacagtaatacagttcaaagtcgaagtatccattgagtccctgcaatgccattattgtggccattatcatgagtaattcattaaaaacatatcaataatacttcagatactaagtgtacatgcagcagaaaaaaaagttaaagatggagatatggcaataggtaggcaaatgtaaattcactagaattgattagagaagtattctggagaatggattaagcaaatcttttctgggctcagatttgctagaatacagttccctactatagagaacaatgactagctcaaaatagacacttaatagatatttattaaattaatgaataaagccagggaccctttggaatgaggtagagatgactgcagaatcctgataggtgaggatgactacacacagccttgcagaaacagataaccaaactaggatatttgagtgatgactgtgatgatgagtgggagctacgtgatgcttcatcctttgcgtggaagagtggcactcttaaatgaataccttgtccctggggtgaatgccaatggaatattatgatcgtgactcaaggattagtttccacagtggagtctgattcatagcctacatattccactaactggtaccgtataactgggtgtctggatagaggctcagatcaagtttcctgaaaagaagattgaatggacaaagatctttaagggtattcagacaaaagccatttgactagctttctttcagtttatcgttgttttataaaatgacttccctctagactttattgtaagagctgggattctcagactagttcctggagttttaagtaactgtttcagctaagaatgacctttacttttgtaacaaggctgaaagactgaaccctcttaaacagtcacagagcttactggaaactcaagtcgtcttcaaagcaaatgagtttaacaagtatttatcagaaatagaatatgtgcctgccataagtggcaaatattcttcctggatgtgaagaggttataattgaaatgagacaatggcataatccatagaaaacaaccagagaacaatatagtataatatataataatgtttatatacctacttcatgcaggtaaacacctaaacattgagatatgtgattgcccatatgatttaattacttttatcaaggtaaaacatgtgcccattttaaaagtcagatattatttctttgaagattttctgtctttttctccatgttttctcttcctagaattcctgttagccaaagtttgcacttcctggattgaccttaaaattttcttttctctcctgttttctgtttctttgcctccttaatctacttcttggaagatttcttccaagtttccccctttctttaattttaaaattttgtttattttttatttttatttttttttatttttgagacagtctggctctgtcgcccaggctggagtgcagtgccgtgatcttggctcactgcaacctctgcctcccaggttgaagcaattctggtgccttggcctcccgagcagctgggattacaggtacgtgccacctgtctggctaatttttttatttttagtagagatggggtttcaccatgttggccaggctggtcttgaacctctgacctcaagtgatccacctgcctcagcctcccaaagcattgggattatgggcgtgagccactgcgcccagcctaaaattttattttttatttatttattttttaattatacttcaagttctagagtacatgtgcacaatgtgcagatttgttacatatgtatacatgtgccatgttggtgtgctgcacccattaactcgtcatttacattaagtatatcacctaatgctatccctcccccagccccccaccccacaacaggccccggtgtgtgatgttccccttcttgtgtccaagtgttctcattgttcagttcccacctatgagtgagaacatggggtgtttggttttttgtccctgcgatagtttgctgagaatgatggtttccagcttcatccatgtccctacagaggacatgaactcatcattttttatggctgcatagtattccatggtgtatatgtgccacactttcttaatccagtctatcattgatggacatttgggttggttccaagtctttgctattgtgaatagtgctgcaataaacatacgtgtccatgtgtctttatagcagcatgatttataatcctttgggtatatacccagtaatgggatggctgggtcaaatggtatttctagttctagatccgtgaggaatcgccacactgtcttccacaatggttgaactagtttagagtcccaccaacagtgtaaaagtgttcctatttctccacatcctctccagcacctgttgtttcctgactttttaatgatcgccattctaactggtgtgagatggtatctcattgtggttttgatttgcatttctctgatggccagtgatgatgagcattttttcatgtgtctgttggctgcataaatgtcttcttttgagaagtgtctgttcatatccttcgcccacttgttgatggcatgggcaaggacttcatgtctaaaacaccaaaagcaatggcaacaaaagccaaaattgacaaatgggatctaattaaactaaagagcttctgcacagcaaaagaagctaccatcagagtgaacaggcaacctacagaatgggagaaaatttttgcaatctacttatctgacaaagagctaatatccagaatctacaaagaactcaaacaaatttacaagaaaaaaacaaccccatcaacaagtgggcgaaggatataaaattttatttttaaagttctttcttgtttctgatgatttcctagtcctaacgtcctacttgtttttatgaatacaatctcttatttctctgagaatattttacttcgggtttggtctattttctttcttaagttttgtttcaggtcctatgttgtctctggttccctttggtccctttgctgttgttattgttatttctctttaatactggacatttccctccagatatctgttgttgatatttgagagtaagtcgctatgaagttgcctggaggttctgtaattatgttgggcttttcaactggtgggtttcactgttgggaaaccccccaattgttagtgtcttctctctgaggtcaatttgtttctccagagaagaaacttctaatgattgccagttatgttttacagccatggttagtgacaaatcaggagtgaaggtgattcctttatataagttctgcaactgagtgaattccaggtaaaatatgtcttaaaagtgatatttacttacagaattcttaacatgctgatgataatttaattcatttgcagtaaatgaaatgcctgattttcttttcttttcttttttttttttttgagacggaatttcgctcttgttgcccaggctggagtacaatggcacgatctcggctcactgcagcctctgcctcctgggttcaagcaattctccttcctcagcctcctgagtagctgggattacaggcatgtgccaccgtacccggctaattttgtatttttagtagagacggggtttctccatgttggtcaggctagtctcaaactcccaacctcaggtgatccacccacctcggcctcccaaagtgctgggattacatgcctggccaaaatgcctcattttcatacctctggtctgacataccttgtgtatattctagaagcatatacactcctagaaagactgaagtaaacactctcaagtagaaaatgtggtttccttaacgtatttctcaactttttgcattcttggtaatacattgaagtgcaaatatgcatacctgtcactcagaagaagagaatcaacctgtttaaaatgtgtatggaaatacgccgggtgtggtggctcacacctgtaatcccagcactttgggagcctgaagtgggcagatcacttgaggtcaggactttgagacaggcttggccagcatggtaaaacctcgtctctactgaaaacagaaaaattagccaggcgtgttggtgcacgcctgtaatcccagctactcaggaggctatgacaggagaatgtctttaacctgggaggcggaggttgcagtgagccgagatcgagccactgcactccagtctgggtgacagagtgagactctgtctcaaaaaaatgaaataaaataaaaggtgtatggaaatagaacaaggaggaagagaccctaacagccttctagtagagtttaatattggatgttcactgtcactaggacttgaagcctcaactatgatttttaacttggagaaaaccttgatatattcttttcttttgagatgcagtcttgctcttgtccctggagtgcagttgtgcaatctcggctctctgtgacctccgcctccagagttcaaacgattctcctgccccagcctccgaagtagctgggattactggtgcccgccaccacatctgactaatttttttgtgtttttagtagagatggggtttcaccgtgttggccaggctggtctcaaactcctgacctcaggtgatcctcccacctcgccctcacaaagtgctgggattcacaggcatgagccaccgtgcccagccaatgtgtgtatatatatatatatatatatatgtgtgttttttttttttttttgagatggagtctcactctgtcacccaggctggagtgcagtggcacgatctcggctcattgcaacctccgcctcccgggttcacgccattctcctgcctcagcctcccgagtagctgggactacaggcacctgccaccacgcccagctaattttttgtatttttagtagagctgaggtttcaccgtgtttagctaggatggtctcgatctcctgacctcgtgatccacccacctcggcctcccaaagtgctgggattacaggcgtgagccaccttgcccggccccagtatattcttttttaaacccttagccttatatttgtaaaagtttaaaacagcatacttcatgtgccacattttaggaaactgtctgagatagtgattatatctccatattagaaataagtagaaaggcccagaaatttttaaatgacttgctgaaaatcacaaatctagcaaatgtcatacttcaaccaaaacgcaactccattatgtattttaaagcacctttctactaccactagccaaaaggactctcatcgggcactgggagaatcctacaggataaagctgcttggaaaagattactttggtaaaaatagcatcagaaagaaaaaaaagagttgtctaaaggaaaaattccatttgggctgactacaatctaatgaataatgtttacactctgaagaatgtatagtccagatcaagtgttttcttatggccattgttgagtgaaaaaaaagtttagggattattattaaacattaccagagaaccagtttctctcgcaaatatttctttttatttatttatttattttttatttgagatggagtctcgctctgtcacccaggctggaatgcaatagcacgatctcggttcactgcaacctccacttcctgggttcaagtgattctgctgcctcagcctcctgactagcggcgattacaggcacctgccaccatgctgacctaatttctctcaaatatttccttccttgtcttccaacttgtgatttataattactttgtttttttctgattacttttattgattaacacatactttgttttctgcctcctataacattgtttatgaatttcatccttaagttctttttatttaataaatgttataaactacctatattattataagctagttttttcccaaatattttaaaacttttcgttagggaaaatttcaaacatacacaaaagtagaaagaatattgcagtgaacccctatgtatgcctcatcccgttctaaaatatatcaacattttgttgattatatcatccatctcctcctcgcttctccttttttctagaatcttttttaaaaaatacatattgtacccataaacacgttgaaatgcatctgtgatggttaggagccttttacatatataaagccaccatgcagtcgtgacaaaattaatggtaaaagcaacattaattctaaactgttttggctagataaatctctaagtcactatgtcattttagtattgacaaaattcaagatggatacatctcttttgacttgcatctgtctaattcatctattttctgatattcacatctctttgggatggagcatgtcagttatttaccataggattttctctttctttaatcagataacttttgataatgcatgggttaccaatataattgaggccttcctttggaacctaaaaccaagagattagagttcagatttggaatttatcatctaaccacatcttatctaagccttaattgccgcactgtatttagggttcaaacatctgggatagctaccttactcattcctaggcagaggtgaaaatgtactctatgttgaagtaactctattagttcctattatagcttttccaaatcctggtttttatatttatataatataaaatttatgaaacattgcaacagtgtttcaagtactggaaattttatatgtttggcaaatacttgatgctcaataaagagtagctctcattatctaccttatattgttgtgagagtgtctgaaggcactgtaaactgtaaagtgccatgatatgtaacatgtaataattgttttttatatgtacaaatggaatcatatatgtaattatgaatccacatgaacagttaagtaatgggaaatgcatgaaaagaacacattaaaaagtcaagtaaaaatacacagaccacgaatctggggaagcacttcttcataagaaaccaaagcaaagatcaaagtctgttttcaaaggaatacaggatttctaaagcctattaacaattaagccacaattctttttacttatactcacgaattttgattggatgtattcttagggacagtgtcaacactggatgtactgaaggagaacaaaaataagaattatacagcaaattaacaggagtaaataattagccagaaagtcctatatgtgggccacaagccccacattgaatatccaataattggtagttctaaaacgaactcttgtttctttgatcccccattgaaaattttgacttatggagacgatttcataaatgtaaaacataaaattgtagacttttttctcttcagtttttaaactaaagaattcacagagctctcaatagttaagatatcacaaaggataaatgcttgaggggataggtactccatcatccatgatgtgattattatgcatttcatagcgtatcaaaacatctcatgtaccccataaatgcatacacctaccatgtacccacaaaaattaaaaattaaaaaaagttagataccagttttcgctaatagcattctttttatttaaatgagtttattatatgtgaaaacattaaaataaacatcttattttgtaaaaaccactattataacttggtttttatcttactcttgatctttaggaatcagttcatcttctagctgtcatcaatgtttttgcctcatattttaaacaaaatattattaatacatttgcaatgggaaatatatcctagtgtgccaatttatcttcatattaaaatgtttagttggcagttgttgacagggtaaaagcaaagtaattcagctattataattttacatttatatagttactctttgagacatacataaaagctcaattttgtatgattcatataagcaactcaattttgtcggtctgatagggcttttataaagctctcttatagctatctctccctttactgaaagtaattatgtatttggctcttaggatattttttaaccttctgaagttaatttgggtatgaccctggcatgttatttataaatattagcaacaggtggtaaaattgccgaaatatattatactgataccataattttggagcaagctagtcaaatctgtttactccatttaatctgagtttcctaagcttcaccagcctgcagggaccagtagatacaaaataacaattataacccaaatttcactgacttagctcttctcttctcataaaagatcccaagcagctataaagtgctcttcagtatttctgggattcccaggcatggctcccatgcgctctaaaacaaatccagtcctgtggagcagtatttccaggcatatgcagcgcacctgttgtcaccttggagtcctgctgtgtcccactgggctctggttcctcctcctttccttacgatgagttcttgtccagaagcatccttaaaaagcttatctcaaccttttcttaggtatgatgagccaaactagtttaaaaaaaaaaaaagtggagtcatgattctgaacacagtgtggtgtggggcatcattcagctttgaggacatgtctgaatctcagagacagcaagaactaaaactaagatcttaaaaccagaaagtactgttttactaaaaaaaatttcctacagcaccactgtccagtttagtagccagtagccacatgtggctattgagatttaaattagcttaaattaaattggatttaaaattcagaacctcatttgcactagacacatttcctgtgctccatagctacatgtgatcactggctcctgcattggacagcagtagtacagaacatttccatcagtacagaaagttctgttggacagggttcccctagaacattaggtctcaagctgcaagacattgatacccctgtactttcacaatgatccagtgtattgaggaaaacgcctaaagctgctgtactaggtggttatggctgaaggagtggagccccatcccaatggctttatttttctctactggtacctgccctaatgtttaagcaagaaaatactggttttaaaggggtttgttgagttattttcttaagcaacagtaacccacatccccgtttttcctgttttcattgatatgttatagtcttcagtaaaaatcatatgagttttcaaccctggaaaaaatcttaaaaactgtttatagatcagctaaacttacatttgatcagataaccaggtaatcaaattgtaagaataatcagtttctacttctgaaatacatttttaaaaactaataaaaggctattcatttcaaaaagtaaaactttttatagaaaacattttattctgccactacataatgtagtcttgtgccaaggtttgaaaaagagagagagagaattaaaaagaagaagaaaaactactttgggaattatttgataattattttgtttgttgtttagaaatattctctggccatatgtacaatctttacacatacttcttgcagtgtgtttattgtactgagaagaaatctttgttttcactgatcactgtgcatcatttgtgcttactaccatttgttaatgaataggaaaaagactactaaaaatctaacaaacagattttgctttttaaaggtcttttcttggccaggtacagtggctcacgcctgtaagcccagcacttaggagactgagattggaggatcactttagcccaggagttcaagaccagcctgggcaacagagtgagacccctgtctctatttaaaaaaaaattgtttttaattagccaggtgtggtggcgcttgcctatagtcccagctactcagggactgaagcaggagaatcacttgagcccaggagtccaagttgcattgagctacgattgtgccactgtatttagcctgggcaacaaagtaagaccttgtctcaaaaaaaaaaaaaaaaaaaaaaagttctttttgtgaaatacaaaagagcagaagatattatcccaacttctgatagggcagtctaggcaaggaagacaaagaacatatataagatgttttgaaattattaaagaaggatcagagtgttgaaattattgtaagcatcaaggctgcttgcccgtgaattaaggaagtttgcaggaggataatctcagtaaagtctgtagactgaaaactttcataaatcctgagttgttaacagtgttttcaggcccactaatgctagtgttgtttaatacatagaaaaaattgaatatgaagttcagtagtttgtaacttttagattcatttacctttgaaaatgattaaaaccggaatctggagcaataaatctaacaaccaaatgatgagctaaatagtgacttccaactatgtgcagtgtgttggtaggccttacactatatggaaaaacttaggaattatttttaaccttccttttggaacattgtgtaaacattcttagattatacttaaactattaagtggggtagttttatctgaatctaagtccacttgagttgtggatttcacctctcatggatgtgtgttttaattgtggggtaatgtcaatggaagatcagggttataatatcatggcatttgaataatagaaattcacgtaaaatattctaatctgtcaaactttaccaactgtgtgcagattccacagccaaggatgggagtgtggctcatggccactagagggcaggaaaggtcaggaaccggatgtggaagcctggggaaaagtataggggaaagcttggatcaccccttcgtaaggaagacaacttgccacaacttgaagcaaacacaattcagtccctgaggcaggaaagacagtaaacgatgcaggaacataagccacagtcaaggccaggaggacacatgggcagggaattaataaaccagtctggagcccaaaccttaccaggctgtcaaactgctggcagaaagctaaatgtaaggccaggttgaagaaggcagtcagattgcagggagttgagcaggtcattcgaccctcactattattgctccaagttgaacatactgacccttttgaaatgggcaaagtgggactttaagaatctagtgattgaaaagtcaaaggaaatctgataccatcttcttttgatattgcagcatttcctgtcacaactcctgatttagttttgtaatgctagaactattcctatttccttcttggaaaattccctccacgtcctagagtacttcctcaggtctaaatagctaatgtttacaaaggaaggattaagtaagacgaagatgacacagcagagttttccattaagacatgccatatcggccgggcgcagtggctcacgcctgtaatcccagcactttgggaggccgaggcgggcggatcacgaggtcaggagatcgagaccatcctgggtaacacagtgaaaccccatctctacaaaaatacaaaaaaattagccaggcatggtggcgggcacctatagtcccagctactcgggaggctgaggcaggagaatggcgtgaacctgggaggtggagcttgcagtgagccaagattgtgccactgcactccggtctgggcaacagagtgagactccatctcaaaaaaagccatgtcaataatcatatttaatattttataaattgtatattcataaatatatacaaatatatttataaattatcatgtttaataatttagaatttatctttaggtcttaaatagataaattatgttaaaactataaaggtaaggcacattgggctataacaaagaataaaagttttccttaacatttctatatacatgaatagaattttatccttttcctttgcagtttttacacagattttaattatatatgcatatttgtccaccatgcatgactggaggctccatgataccagaaataccctcctgaacttaacctggagcctgactctagaagctagtcactagtatttgttgacctcaaggaatttaccgtctggttggagtgcaagagaactataatacagatattaaaaacagatacaaagggaagtagaattacagaggaggaaattagcaatttagtatcatcaggtaaatttttattaaaatggcattgtggccaggtatggtgcctcaccctgtaatcccagcattttgggaggccaaggcaggtgcatcccttgaggccaggagttcgagaccagcctaaccaacgtggcaaaaccccatctctacaaaaaaatacaaaaattagccaggcataccggtgcatgtctctaatcccaggtacttggggaggctgaggcaggagaattgcatgaacccaggaggtggaggttgcagtgagccaaaatcgtgccattgcactccagcctgggcaacagagtgagactctgtctcaaaataaataaagacaaaagtgaataaaatggcattgagctgggtgtgctgagtgagcttgagagggcaaaatataggatcattgcagctattggggggcttttgttaatagaaggctgcaaggtagattggaaaaaacaaactagaattccatgccaaggaatttagtttttcctctggaccagtatttttgaaatgtggtcctcaccagtctgtaagatgcctcgtataaaacctaccccattgacagataggtttgtataatgccacatgctgtatcttggaataccacagtgcacattagtaaatctaagttcctaaagttctgtaggaaataaacttttgagcttggtttaaccaaatgtatcccaattatatgaccagcgttagatggcctgctcatttatcttcagctattaacaatcattgctcactcctcctggtttctccagacactgaatagatacatgtttctcaaggtgtattgctggccagatgcattagtatcacccaagaactgcaaattctcacacattataccagatcagcagaatcagaaattctaggggtagagcccagcaatctgtctttaaatagcctatcaggtgattttaacacacactgaatttcagcctgaatcttgaaactctagattaggttgggcacagagcctccagctttcctcagctaccacagcttccttttatccattttaaagtagtttcctgtttatctgttttaaaattcaccttctcacacttacttgtttttaaattgaacatccaagattttacacagctcagctccttggtttcttagaattgaaggcactctatatttgcaacagtagcagtcgtctgctgatttcatttctcatttaaactgcagagataattctccagagaatgttagcgtccacctcttcgaaagttatcttttcctttccctagtagcttggcagacatttctaaaaagaaaaaaattaatatcataattagtgctcagaagtgtgaatctctattttcagtcgagagtgaatacttttcttttggaaaggaagagctttatccattttagcagttacctagctgtgagtatttcctggctaaattataactttataccttagttctcttgttattttcctttgttcagaaatataaatttgaaacaatgggatgagcccctcccttttttagaggtggaaagaaagttgaaacaaatgcaaaacctttttctcatatttagtagtcatctagtttaggagcatacaatataaattgctcctaaaaatgttggatatattacattttaactttagaaataattataaaatcctatttatatttgatacggacacaacctctgattcctgttatgtcttgcctgcttcagattccttctttcctgtagcatattaaaaaatggtttgtatttttaaatcctcacaataaatcatgaatgaaactttagagcatgtaaagataaacttgacaaggtaaatcatctgttttcacaagtctgtgataattagaaagtaagaactccaaagaaattgaaattcaaaggacaataactcaaagtgaaactgatttagaaagtagtttctcctgacttccacctcaccccaatctgtgaggtaaaagcccctttaaagatgtgagggtttctaagggccgtagaatttcaagtagtgtgaagctactatcaaagaaccaagtaccggtgtctcttggtatttgcagggggaatggttccaggaccccacagacaccaaaatgagcagatactcaagttccttaaataaagtggtataaaatttgcatgtaacctacacacatcctcccataaattttgtcatctctagattacttataatacctaatacagtgtaaacactatgtaaatacttgtgctgcattgttttttaatttgtatttttttattgttgtgttattttttcttttcaaatatttttgatcccggattgattgaatccaccgatagagagagctgactatacagtttatgtcttatagtcagatctaccagaaaggctagaggccgagcaaatcacaaacttaagacatggaatgcttgctttatgcaaagatatccagtttccaaagcactatgattttatagcacagattaaattgtttatctaactccatttcctcattgacatatagaaagattgactcagtaaattttgaacttctaggaaaatgttttaaataagcccattatagtataaagcacagtcaataaggaagtaggaaagaagcagctatacaaatgcaattttgtttattaataagattggtttaccttagaaaacagttaagttaaatttacagtgatttttgtgagccttttttctatctatatctagtatgtagtatgaatccatatagtgtggattttgagaggaaggatgttcatttaaaataatagtttttattatattcagcaagcagaaaaatatggtttcttatttttaaaatactataaaaggtctattcatataagttctgcttatttttctgagacactcatgtgcgaatatcatgtgtccaaatacccacttttcatgtgttcaaataaaaaaaaattaaatgtcttataaatagaatggaaatttaaactccactttaagcaaagaggttcttagataatttcaattcaagtttttaattgtaaaacttacaattaaagttttaattaaaaactttaagtttttaattgtattctggtcttttgtgatctctgaagtatttcttgatctgttagcttaatttaaatagtatgattaataacggcttgaacatttttatggctgtaaattctttcaatttctttttttactgcctgccccaattcttgtctttagaattatatgatctatacagaggaatcatgacatttgcgcatagaggattttaatacagctctgtgaagacagttgttattaacaatgattaagatactaatacaaatgtaagcctcttgatcttgaatctttgatcttgatcttacctttgaagaaaggtatttaaacttatctgtgcttcttggctcactcagaaaagtatttccttctgtagcatccaattaatcactaagatctgtttctatctcaggttagtttactgtaatctttattgttacacaaaataaaattattttagatatatatgcaaaatgataaataccagcttggttgaggcattgtttgtggtagcaaaagatttgaaaccatttagattgtcagtctgaatttagattgacaatctaattgtctgtcaatagggaactagttaaggaaattttgctgtaccatataatagcataccatacaaccaccaaaaaggtaaagcatctctatatatattgatatgtgaacaaagtatgaaagataatgttgaaggggggaaagcaagctgcataacactatgtcagagaaaactctaaagggatggataggcacaaaaataaaacagctatcaccttttgcaaggacagagggtaaaaatggatagctggagggtagaaactgtttcattttctttttgattttgtactcggtgtatgtgttacttatatttttaaattactttttaaaaaatgttcttgaaagaaaagtgctgatagctaaatctgaaaactgaaaaaacaaattatactatatctaatattcaggtataaaatttatttttactctttaaaaagcatgattgaaacaaaaagtttgatattacagcagaaaaccttggctatcttgttggcctctggctgtgaagaaattattctttctataatcctttgccttttacagtagatttgccctggaaaattatttataattcatatttattatttatttatttatttatttatttatttatttatttatttatttatttatttattgagttggagttttgctcttttgcctaggctggagtgaagtggtgcgatctcagctcactgcagcctctgcccctccaggttcaagtgattctcatgcctctgcctcacgagtagctgggattctaggtggccaccaccacgcctggctaatttttgtatttttagtagagacggggtttggccgttttgaccaggctggtctcaaactcctgacctcaggtgatccacctgccttggcctcccagagtgttaggattacaggcatgagccaccgtgcccagcctataattcatatttaatagaaactctttttaaagcaaagtattcttcaaagttgtgacactttaacttaactgttttttaaattctgattttttattactttggattctcttaaagcataacatttagctactattcattcttattaaagttaacaacatttgacctcctaaaattagagcatctttagttctaattaaagtttttacaaaaacagcaatttggattttctttttatgttctaaaaattgttttaagaaactgaaattcatgtcattataatactagaaaaggtattatttactgactaaactgtgcccattgcagatagtcctgtttaaaatcacctggtgttctaaattctttttcagactttcaggcattcttaaattacttatattataccaaatgcaaatttgttttatgaagtaggctgcatgcagttcaaatataggaaataactcttgcaaagaaatgcttgatactcagaatttggaacaattggttggctagggaaatattaatgaacatcacagactgacttgccttcataggaatgaatttaaaacgattacttttcctttgtaaatggaaaaagaacctctaattgtcctgtatttatagcaaccatatgtcccagactttccaggatagttcccaatttcagattctccatcttcttctgagactatgcatattgacttttagtttggaaaattttttcatttttcaaatattggaaatacagctatttgggatcatttcattttatgtagaagtgaagaaactcatttcagatcattggctttaaataagacactgttgcaagaaatatttaaaatgtaggtacttgagacaagaaaattctcaccatgtgggatttttgttcttttgttcccaaagacaaccaatgaacaacaaatatagagcaataaaaacaggtgatttttttagggagatgggatgggatgagttttctttctgtccctcagtgaccaggcactgcctctccaatggagatgaaagctgtagggaagattgtaagagattttaggaaataagcacaataagcacatgaaaagatgctcaatctcattggctgccagggaaatgcaaaaagccacgatggtatactacgtcacacccactaagaagggtattgtcataaagacaggtcattgttggtaagaaaggggaggaattgaaatcttacagtgctgatagaaatgtaaaatgatgcagcaactttggaaaacggtctggcagatttttagcaaattctgttcctgagtatatatccaagagaaatgaaaacatatgttcgtacaaaagcttttactcaaatgttcatagtggcattatttataatagccaaacagttgaaacaacccaaatgtcaatcaactgaaaaatggataaataaaatgtggtatatccatataatgtaacaacaataaaaaaggaatgttacagtatggatgaatcttggaaacatactaagtaaaataagtcagtcataaaggaccacgtattatataattccacttatatgaaatatccagaataggcaaatccataaagacagaaagtggttggtggttgcctaggactgaaggaggggtggggaaatgggcagtgaatgctgattggtaagggtgttctttttgggtgatgaaaatgttctaaaattgattgtctaatggttgaacaactctgtgaaaatactaaaaaacattgaattgtacactctaagtgggttaattgtatgtgaattacatcttaataaagctttttttatttttaatttttgtgggtacatagtaggtatatatatttatgaggtacatgagatattttgaaacaggcatacagtgcataataattgcatcagagtaaatggggtatccatcccctcaagctttatcctttctgttacaaacagtagaattatgctcttttagttatttttaaatgtacaattagtcttggtgtggtggttcatgcctgtaatcctagcgctttgggaggccgatgtgggcagattgcctgagctcaggagtttgagaccagcctgggcaacacagtgaaaccccatctctactaaaaaatacaagaaattagctgggcgtggtggcacatgcctgtaattctagctactcaagaggctgaggcacaagaattgcttgaacctggaaggtggaggttgcggtgagctgagatcacaccactgcactccagcctgggtgacagagcaagactctgtctccaaaaaaaacaaaacaaaacaaaacaaaacactaaattaaattatttttgactaaagttaccctattctgctatcaaatactagatcttatttattcttttttgtgtagccattacttatctctacttctccctaccccactacccttgttagcctctggtaaccatcattctactctctatctcagttcaattgttttaatttttagctcccacaaataagtgagaacatgtgaagtttgtctttctgtgccttgcttatttcacttaacataatgaccttcagttttatccagttgttgcaaatgagcggatctcattccttttatggctggatagtactccattgtgtatatgtaccgtattttctttatatgtctgttgatggatactttggttgttttcaaatcttggctattgtgaacagtgctgaaatatctcttcagcactgaagtgcacatatcctttcaatacgctgatttcctttcttttgggcatatacctagtagtgagattgctggattatatggtcgttctattttcttccaatctatgggctgtctccccactttgttgattgtttattgtgggctgtgcaaaagctttttaccttgatgtgatcccatttgtccattttgatttggttgtctgtgcttatggagtattactgaagaaatctttgccttctccaatgtctgcagagtttcttcagttttcttttattactttgatagttcaaggtcttagatgtaagtgtttaatccatttttatttgatttttgtataaggtgagaaataggagtctagtttgtttcttttgcatgtggatatccagttttctcagcaccagttattaaagaaactgtcctttccccagtgtatgttctcggcacctttacccaatatgaattcactgtagatgtatggatttgtttctgggttctctattctgttccattggtctgtctgtttttataccagtaccatgccattttggttacaatagctttgtaatgtaatttgatgtcaggtaatgtgatttctccagttttgttctttttgcttaggatgcctctggctattctgggtattttgtggttccacataaatttcaggattctgttttctatttctgtgaaaaatgtcattggcatttttatagggattgcatcaaatctgtagattgctttgggtagtatgggcattttaacaatattgattcttctgatccatgaacatacctttccattttttgtgtcctctttgatttctttcatcagtgtttgatagagatatttcacgtctttggttaattcctaggtaatttatttgtagttattgtaaataggattgccttcttgatttattttacaaattgtttactcttggcattgagaaatgctactgatatttgtatgttaattatgtatcatgcaactttactgaatgtatcagttctaatggttttttggtgcagtctttaggttttttcaaatataagatcatatcatctacaaacaaggataatgtgacttcttcctttccaatttggatgccccttatttctttttcttgcctgattgctgtagctaggacttcccttactacattgaataacagtggtgaaagtggcattcctgtcatgttccagatgttagaggaaaggcttttagtttttccctattcagtatgatattcactatgggtctgtcatgtatgacttttgttatgttgagctatatttcttcgataccattttttgtagtgttttatcatgaaatgatgttgaaatttatcaaatactttttcagcatcaattgaaatgatcattctgtttataatcaatacttcattctgttgatgtgttgtatcacattcattaatttgcatatcttgaaccatccttgcatccctgtaatgaatcccccttggtcatgatgaatgatctttttaataggttgttgaattcggtttgctagtattttgttgaggatttttgtatcaatgcttgtcagaaatttggccctgtagttttcttttttggttgtgtctgtttggttttggtctctgagtaatactggcttcatatgataagtttggaagtattccctcctcctctgtttttcagaattgtttgagtaggattggtattagttctttaaatatttggtaaaattcatcagtgaagccattggatgctgggcttttccttggtgatagacattttattacagcttcaatctcattacttgttattggtctgttcctgttttggatttcttcatggctcaatcttaataggttgtatgtgtctaggaatttatccacttctagattttccaatttattgcatatacttggtcataatctctaatgatcctttgatttctgtggtatcagttgtaatgtctccattttcatctctgattttatttatttgggttttctctctttttttcttagtctggctaaaggtttgttaattttgtttatctttttttaaaaaccaacttctttttgttggtcttttgtgtcattttcttcatttcaatttcatttatttttgctctgatcattattatctcttttattctactaattttgggtttggtttgctcttgcttttctagttctttaagatgcactttttacgctgtttatttgaagttttttttttcttttttgatgtaggcactgttagctataaactttcccctgagtactgcttttgctgtatcccagaggttttggtatgttattcttccattatttgtttcaagaaaattttcaatatccttcttaatttcttcattaacccactgttcattcattcaggagcatactatttaatttcgatgtttttgtatcatttccaaaattccttttgttatttatttctagttttattcctttgtggtcagagaagatatttgatattatttcaatttttttttttttttttgagacggagtcttgctctgttgtccaggctggagtgcagtggtgtgaccttggcacactgcaacctctgtctcctgggttcaagcagttctcctgcctcagcctcccgagtagctgggactacagaccagcacgctctgctaattttttgtatttttagtagagatggggtttcaccatgttggcaggatggtctcgatctctgacctcgtgatccacccacctcggcctcccaaagtgctgggattagaggcgtgagcaaccacgcctggcccatttcaattttttaaaacgttttaaggcttattttgtggcctaataaatggtctgtccttgagaaggatccatgcactgagaataatgtgtaatctgaagcagttgaatgaagtgttctctaaacatttattaggtccatttggtctgtagtgcagattaagtctgatgtttctttgttgattttctgtccggatatctgtccaatgctgaaagtgtgatgttgaattctcaagctataattgtattggggtctgtctctctctttatcgctaataatattttctttttatatctgagtgctccagtgttgggtgcatatagacttataattgttatatcctattattgaattgacccatttgttattatataatgaccttctttgtctttttttatagtttttgtcttgaagtctattttatctgatacagctactcatgcccttttttgatttccgttttaatgaagtacctttttccatccctttgtttttagtctttatgtctttataggtgaaatgtgtttcttgtagacaacagattgttgggtcttgattttttttttttaaatctattcagccactgtatgtcttttgattggagcgtttagtctgtttatattcagtgttattattgttcagtaaagacttacccctgccattttgttatttgttttctggttgttttatagttttttcttccttcttttcttccttcctgtcttccttttagtgaaggtgattttatctggtggtatgttttaatttctgtcttttaattttttgtgtatcttttgtatgtctttttatttaaggttaccaagaggcttgcaaatattttataagttattgttttaaactgatgacaacttaacactgattgcataaacaaagtaacaagccaagagaaaactaataaaaactctaactttgtcctcttgctttttttttatttctatttatatcttcttgtactatgtcttaaaaagttgttataggtactatttttgatcagttcatcttttagtctttctacttaacatatgagtagttagcacaccacaattacagtattatcatattctgtgcttttctgtgttcttactgttaccagtgaaatttgtaccttcagataatttcctgttgctcattaatatccttttctttcagactgaagaactccctttagcatttcttgtaggacaggtctggtattgatgaaatccctcaggttttgtttgtctgtgaaagtctttatttctccttcatgtttgaaggacattttcgccagatatactattgtagggtaaaactttttttacttcagcacttctaaaatgtcatgccactatctccaaggtaataaggtttccactgaaaagtctgcttcctgatgtactggaattccattgtgtgttatttgtttcttttgctgcttttaggatccgttctttacccctgacctgtgggagttttgttaataaatatcttgaggagtcttatttaggtcatatgtgcttggtgttctataaccttcttgtacttgaatattgatctctttctctaggtttggacagttctctgttattatccctttgagtaaactttctacttcaatctctgtctctacttctttaaagacaatacctcttcgatttgcccatttgaggctattttctagatcttgtaggtgtgcttcattgttttttattctttttattttgtctcctcttactgtgttttttaaaatagcctttcttaaaattcactattctttcttctgcttgataaattctgatattaacagactctgatgcattactcaatatatcagttgcttttttcagctccagaatttctgcttgattctttttaattattttaatctcttttgttaaatttatctgacaggattctgaattctttttctgtgtatcttgaatttcattgagtttcctcaaaacaactcttttgaattctctgtctgaaaggtcacatatatctctgtttctgggataggtccctggtgctttatttagcacattctgtgaggtcatattttcctggatggtctagatgcttgtggatgtttgccaatgtctggacattgaaaagttaggtatttattatagtcttcacagtctatgcttatttttacccatccttcttggggaggctttccaggtattcaaagggacctggttgttgtgatctgagttttggttgctgcagccatatgtgtgttaggggacattccaagcccagtaatgctgtggctcttgaacttacagaagtaccaccttgggaccaggcatggtggctcatgcctgtaatcccagcactttgggaggccaaggtgggtggatcacttgaggtcaggagttcaagaccagcctggccaacatggtgaaacccaatctctgctaaaaatacaaacattagccagacatggtggcaggtgcctgtaatcccagctacttgggaggctgaggcaggagaattgcttgaacctgggaggtagagattgcagtgagccaagatcatgccactgtactccagcctgggcaacagggtgagactctgtctcaaaaaaaaaaaaaaagaagtgccactttggtggtcttggatgacatctggaagaattctttggattaccaggcagagactcttgttcttctcccttactttctcccagacaaatagagtgtctctctctctcacacacaaatagagtctctctctctctctttctctttctgtgtgtgtgtgtgtgtgtgtgtgtgtgtgtttgtgtgtgtgtgtgtgttgagatgcctggaactaggggagggatgacacaagcatccctgtggccaccaccactgggaatgcactgggtcaaacctaaagccagcacagcactgagtctcgcccaaggcctgctgtaaccactcgctagctgccacctctgtttgctccaaggccctagggctctacaatcagcagataaagtcagccaggcttgtgaccttctcttcagggcagcaagttaccttgggcccagagtgcattcagagatgccgtctagaagtcagggcctggagtcagaaagcttaggaatctaccttgtacactattctgctgcagctgagtggacacacaaaccataagacaaagttcttcccactcttcccttctctttccacaggcagagtctctccgtggccactcctgccacagggctatggggagtactgccagactaccaccagtgttcactcaaggccccagggctcttcagtcacctggtggtgaatgctgccaggcctggaattcactctactgagaagtgggctcccctgtatcccagggaaggtccagaaatgccatccaagaactgagccttggcatcaaggaccccaagaggcttggtgctctaccctactgtggccaagctggtacctaaactgtaatacaaagtcctctttactcttccttctactcttcccacgcaggagtctctatagccaacacagctgagaatgtgctggatttcacctgaaacctgtatgtctcagagtctcacctaaggcccatgatgtatactatctggttactgctgctgattattcaggacctaaggctcttcagtcagcaagtgtcctagcctactatggctgagctggtatccaggttgtaagacaaagtcctctttactcttcttaagcaaaaggaaggagtttctttcagagctgcatgctgcactgcctggggttggtgtaggggtggcacacgcactcccttgaccactccaactggtgtctcactagatcacctgccccccaagtccactggttccaatccaagcccagtacgaactaggacttaactaggaattgcagtccttgtggcctaaactgcctttcaagtttatttagaaccccagagtgctttagcccacagtggtgaggcttgccagaactcaagctccaaccactaggatggacaattctccaccggctctggctgatctaaatgccaccttcatggaccatggctgagttctgcctggtgttgctttccactgtgacaatgcagcactgagttccaatgcaaagtcccactgtcactgagctctcccaaccctaagtgcacggattctccatgccatacagccactgccaggggatggagggggtgggtgtcagcaactgaagactgtctttcctaccctcttcagtgcctctttcagtgatgtgaagttaaaactagatactgtgattgctcacctgatttttggttcttatgaaggtgctttttgtgtgatttttaaattttgtgtttctgcaggtaggatgatcagtggaggcttctatttggttttcttgctccacttcctgcctaaaagctgttacttttaaaaaccaaaattaggaagagacttctgcacgtttgttggaacatttggtcttataccttctgtagcagtggttcttaatgaggaatgatcttgccacccaggggatatttgacaaagccagaaaatgtttttggttgttataactggagggcgggtactactgacacaagtgggtagaggccaggaatgttggtaaatatccttcaatgcacaagacagcccccacaacaaaaaaaaaattatctggctcgaattgtcagtagtgcccaagctgagaaaccctgttctgtgcctgtattactctagtgacagttgatcacagctatgttttttaagcactgcagggtcacaaatcatcaaacatacagatgttcagtgtattctgtttactcaggacaaggctatttaataagactaaaccaaaaaaaaagttgtttttgtttttgttttttttaatctgattaagcctaaacctaagttaactagataattcagttacccaaaatattttattcctcagtcatcctgattgagattttactattttttgttatattttacttattcatgtagagcttcttaaagatcagacttaatgaagcataacatctacttgtgataaaaacaggaataaagaaacatactggctgggcactgtggctcatgcctgtaatcccagcactttggaaggccgaggtgggtagattactggaggtcaggagttcaagaccagcctggccaacatggtgaaaccctgtctctactaaaaatacaaaattaggcgggagtggtggcgtgtgcctgtaatcccagctactcaggaggctgaggcaggagaattgccggaacccgggaggtagaggttgcagtgagccgagatcacgccattgcactccagcctgggcaaaaagagtaaaactgcatctcaaaaaaaaaaaaaaagaaaagaaaagaaacttactgcaatatagccttgaaaacatcattaaaagctaacttacccatttcaaaaattatcatcaactcatgttctagaataggaatatggcgttaaactaagctaatttgttaggccttagactccaaccgtactccttttcttggatatacctgtttgaaatgtccacacactggtccagggaaaggggagcaggggtttcattatatacgccagtattttaaatatatattagctaacatgttttgaatacttactgtgtgctgggtattatgcagggcactttgtattctcttatttaattttcaccaaaccctactagtcgatatgattatccctactcttctaggaaacatctctctcgtagctgtcttcctgctccagtatgcactggttgctctctaggtgttacataactgttactctgagacttcctttccctgtctttctgagattcctctatgctctcctatcttgaatcccctgcatcttccatatcacggcacactccctcattttggtgaagtatatcctccattacctccctgaaaataccagtatctgaaaatgtctttattctaccatcataattgaaaaaggtagtttttctgaatgtagaattctacataagaaatatctttctctcattattttgcaggaagtactctcttatatttcaggtttgtgtattagctactttgttactctccaagcttttagaatttctttatctctggtgctctgaaatgtcacggtgatgtgccttgcagcaagtctttttcccctttcatgcactttgcctaatattcagtgggcctttttattctttttttttggagacggggtctcactccgtcacccagactagcgtgcaatggtgcgatctcggctcactgcaacctccacttcctgggttcaagcaattctcctgcctcagcctcctgagtagctgggattaaaggcatgtaccactatgccctgctgatttttgtatttttagtagagatggggtttcaccatgtaggtcaggctggtctcgaactcctgacctcatgatccgccatccttggcctcccaaagtgctgggattgattacaggcatgagacaccatgcccagccagcccttttatttttaatattctcttccttgagttcaagcaaagttacttaaaatgcttttttgataatgtcctccctttcctcttttctttctggaatgcctattatttcgatgttgacttttgaattttctcctgtaatttccttatttgaagaatcctatagtgtattgtcttttagttctactttctgagaatttttttaactctatcttctaactctatcttgaagtttttgagttatattttttatttctaagagatatttcttgtcctctaattgcttcttttttgcagcctcctatcttgtttgacaggtggttcatctcctcttatctctgggaatattacggtttttctgaggtatttttcttgcaatttgacttgattcttattcatcagactcccgtctttcatttaggtctgtgtgtttcatgttataaactttccccaaatatttagtagtccataactgcccataatgtataatattccaatatttattggaagggttttgttcatgggcatctactgactagtggacttcactttggggtgagcagagagaattagtcattttattggaagacttcctggatttaatatctataagtctgtctcattgggttgcttagttgttccagagaggaattttctttcctgggaagtatatatttgtctgccagtattctagaagccaagtgaaacaaaggagttggagaggtccttattgtttggtattaggactttcactcattctctcacttatctctctgctgtcatctactcttccagtctcccttttttctttcttttactgttcatgtaaattaaatcggacagcatgtactcttttgtatcttctttttataattaaacttttctggccaggcactgtggctcatgcctataatcccagcactttgggagtccaagtcaggtggatcacctggggtcagtagtttgagactagcctggccaacatggtaaaacctgtctttactaataacacaaaaaaattagctggttgtggtggcacatgcctgtaatctcagctacttgcgaggctgaggcagaagaatcgcttgaacgagggaggcggaggttgcagtgagtcgagatcgcgccattgcacccccgcctgggcgacaagagcgaaactccgtctcaaaaaaacaaaacaaacaaacaaaaaaaccacttttctttgagatttatatatgttattttgtatatccgttcatttcatttcatcgctgagtaattctactagttgtatatcccacagttttatttttcaaaggacatttatttccagtttaggctattatgaatgaaattctgtgaacattcttgaagaagtattttagaggatatttgtttttattctcttaagaaaatacaaggagcagaatttcttggtcatatactggtatatgtttaactttataagagagttttgattgcaccacaccctgaccaatatttgtttttgtcagactttttttattttagctattccagggggtttgaagtagtactgcattgtgattttaatttgcatttccctgatgattaatagtgataagcatattttcatataatatttaccatttatttatcttcttgtttgaaatatctgttcaagtcttatgcccattttaatgggacagtttttctgtttattattgattcatattattgacttatagtaatattttatgaattgatctctttattattatgaaatgtttctttttatttgtggtaatactcatcatcatgaaatctaatttgtctgatattattatagccacttatacttactgtatacctgattattttttccatacctttatcttcaatttatctgtatatttgaattcaaagttcatctcttgagcctgaaagtaataagcaccttgaacccggatctttatatctaaatatgattctccagtaaaatttatcagggttctctggacaagtggctgattgattgtagagcagggataagaagagtatatgctgaacctgaatcatttttgtggtgccaaaaagtaaggaagtacacaaaaaaattgagaagatatcagaaatgcacaaaaactaacctgaagtgactctcaatgaccatatctgggacaatttgagtaaaaaaataagtaacaataatggattatatcttataagataatataaaacaaatatcaatgagtctatgatgatataaattagaatgtataaatgggaggaaggggaaaattctttgcttaagcagaataataattaattaatataaaaagaataatggaaatggtagaaatagaaagtcaacatttggcaagcaccacagtaataattgttgcaggcaagaatcatcaatggatgctaaagtttgtgagaaaaagtttgatgagaaatgggctatttacataacctcaaaggcttttcccacaagatactgttaattacaaaggggaaaatattgagaaacatggaagacagcaccttaaccaaatgattgaagttaataccattagtaatgcaacaaatcagtatcgtgtgcctcctgatatgatgcactgagaagggcacaagcatcacctttatggtattcttgcaaaaaatgcataatctaaattcaaccatgaagaaatattagaaggatgttctatgactagtcagtactgctcaaaaatgtcaagattatgaaagacaaagaaagactaaggtactttccagatttaaagaaattaaatagacaggactactaaatgcaatatatgagtctgaattggaccctggactaaaattaggcagacagttggtgaattttgagtcaagtctgtagagtagttaatagtatttctggttttgatcatcataatatggttatttaagatgttaacatttggtggatctgggtgaaaagtatatgaggattctctcgcagtatttttgcaatttttttaaatctgaaattcttttaaaatgagaagttggctgggcacagtggctcacacctgtaatcccagcactttgaaacaccaaggcaggagactcgcttgagcccaggagtttgagaccatcctgcgtaagatggcaagactccatctctttaaaaaaaaagaaaaaagaaaaaaaaagtgaaaaaaaaagaaaaacatttaataaaatatttttaaacaataatgatagatgtcttttataggcaacatatggttagattttgcatttttattcagcttgacaatctctgtctttaattggactagtttgtcataatttatatggctggatttagctctcagaatgtgcagtttatttctgttcctctcatctgtttctttgtttctcttttcctgccttattttgggttagtcagatatttccaatattccattttaactcttctctgtgctttttagctctgcagtcaattaatgattaacttatgtcaatcataccactttatataaaatataagtcttgcaacaatatagatttgattattccacctatcttgtgcacaatgttgtcatttttattacatctacatatattttaaacccatagtatagcgatacaattttttttttgtatacaacaatttgttctttaaaagattgagaaggtaccttaaaaaaaaaaaactttacccacatatttaccattttctggtgctctttattactctctttagatctgaatttctatctggtgccacttatcctcagcctgaagaacttcctatagcatattctgtagtgccaacaatttgtctgctgatgacaaattatctctactttatccgaaagtatctttattttccttcccttttttatggatagtttttgctagatacagaattcttggtacattttccatttcagcacttatagatatcattcagttgtcttctggcttccattgtttttgacgagaagtcaaccattatttgtattcttattctcctgtgtgtaatgtattttaggctgctttcaagattttctgtttatcttttgttttcagcgtttaataatggtgtgcctacccatgttttctttatgtttatcctgcttcagttcactgactttattgactgtctcagcttgtgtttttctaaatgtgtgaatattttggctgtttttttccccaaatatttttctgccctattacctatccccttttatggaactccagttacacatacgtcagactgcttgaaatttttccacaagttccctttatttttcatattagataaattctgtctctatatcttcaagttcatacttttctccagtcatcttcaattgtcttttaaacccatttattgaatttttttatttcatgtattatatttttcagttctaaaatgtacatctggccggccgtggtggctaacacctgtaatcccagcactttgggaggctgaggcaggcggatcacctgaggtcaggagtttgagaccagactggtcaacatggtgaaaccctgtctctactaaaaatacaaaaatcagccaggcatggtggtgcatggtgcatgcctgtaatcccagctacctgtgtggctaagacaagacaaatcacttgaacccaggaagtagaggttgcagttagctgtgattgcaccactgcactccagctagggtgacagagcaagactctgtctcaaaaataaaattaaataaaataaaatgtgcatttgattcatttttagtttccccttcactgctgaggttccccatcttttcattcattatgaccttatttttcttttaagtcctttgaacatctttataatagctgctttattttccttgtctgcttattccatgatctgcgtcatcttgtggctggtttctgttaattactttttctcttcctactgggtttttttttttatttctttgcatgtctagtaatttttttattgtgggctggacaatgaatatagtaactaatagagacagtgaattttattatatttccctgaggagagttgatttcctttttttttttctttttgagcggagtcttactctgtcacccaagctggagtgcagtggcatggtccaggctcactgcaacgtctgcctcctggatttaagccactctcctgcctcagcctcccaagtagctgggattacaggcatgtgccaccacacctggctaatttttgtatttttcgtagagatgaggtttcaccgtgttggtcaggctggtctctaactcctgacctcaggtgatccgcccacctcggcctcccaaagtgctgggattacaggtgtaagcctccatgcccagtgttgatttttgttctagcaagttaacatagctgaactccaaattctgcttcccttttggtgaacatcagctgaaatcagtgctgagccctctcagtcttccatctgttgattttcacttgttcagttcagagtaaaactagggatttaggtaagagtttatatatagatttggaagaactctggtggcttctttttttctgggacgtttctcctctttttctagatatgctgtcaaccccaaactaggccttctgactcctcaagccagtaatagtgcagatttcagcttaagttctaggctctctgcattatgtggactgtagaatactactagaggaaaagccatataaatactgaatcttacctagtgtagttccttctttgaaggattgacatccctccagtttctgcttgtttggggtcattctgttgtactttcaaatagctcttttagtattttgtcacagaatataattgttatctgcagaaggattaatctaatatatgctactctgccattaccagaagttgtaccacattactttttattttccattgatgctgcatatgactgaataaaaaaaaaactctacattttctgtgaatggtggcactatctcatcaaactcttctaaaggaattgagcgtattactaattatattttttcttccttctcttatagacaagagatgatttcctaggtcaagtggatgttccactttatccattaccggttggtataggtgtccatgattttccttttgggcttatttttttaatttaataaatacttacatatataatatagctactgtaaataattgatttatcaaatgtatactacttttatttattgagcatactgttttctaaaaactcatttcaattttccgtttccattttctctttaagatttccgttcatgaaccccagtgagaaatagagaatttctgatgtttgttggcattgtgaaaacattgtgtaaaaaaattagtttgaaaatattctgctgaataactagaatgaggagtgcctaagctcacagaagaaaactaagatagtttacgacaatggaaacataaaacactaagaatcaggactaagaatatagcaaggagaaaaacagattcaggaaacattgcaaaatagaacattattgaatcacatgtctgacatggaggcttaagaaaataagcaagaagtaaagataatacaagttgaacttggaagataagagtggcgtctctcgtagaaaagtgaggaagaaaagccattttgttttgaaaagcaaaaaatttatttttggacaaacagagttttgataggaaacaaagaaaatgaaagtttaaagtagactgctgacagagagataaaaatcagctaggtagggaaaagggactggaaggattgagtgttatcactgtccagataacagcagaatctctgagaataatgggctctcctgatgaaagagataagaacggagggccagccattgaccctcagtcaacgtgagtggatcagaaaagaaagagaagacagacaaggggaaacaggaaaagagccaagtaaaataatgtcatgagaatttaagaaaggagtttcaaggcagactgggtagttaacaatgcagaacatcagagaaggataataaaaactaacaactgctgaattttaaagaaagagaaaaaatacttctttttcagtcttgtgagttatattaattggctctccacagtctttccagagcataatcttttttttttttttttaaacagggtgcaggaccataagctttcagtaatatatttaatccagtcttactttccaggctgttgacttttttgatctcctagaattatctctatgctctaaccaagccagcctgcagacatgtgcatagtccgtgttcttttgggatgttaacatactaaccactctatactgtttttctgcttattctcttctgccctccctttggctccacaacccacctgctcagctagttttcatttgagttgtgatgtcggctgcaattcctcttgggcaggaaagtgaaagcactgtcaagttagcatttgataaactaaagctacttttttttctcacttccaacttaaattatgccttaggtgatagttcatgagtattcttgaaaagtacatgcttttggtgttatagatatattttgaaaacccactattttattctagacagaaaatccaagattggagagaccatatacatttaaggattttgttcttcatccaagaaggtcagtaaatataaaataataatagcatattaaattttttatctcttcattacaccttacagtagccttattagaaattcagggtttaaacctctgtaaataagttacttctaaatattattattattattattattattttaaaagcttcattgctatttctgattaaaagtactgtatgcacattgcaaaacattctgaaaatacagaaagtgatcacagccttttgggaaagattcgttctcctaatacttatcagactagaaggctatttatgtcatattgtcatactatgctttaaaaaatcacaaacatgaattcatctaaaaccattacctaactcgacgtgcacaaagccaatttcagaaaaacctaactatattttgcatacttagtatttcagaagactcaaatatttagagaaaataacataagactggaatttaaaacccaaatagcatgcttataattccattttcccaaacaaagttacttgatgtttatcaaaaaaatttaaatttaagctgtaactaaaactccttttgatcttctatacctcattgacaagtaaaatctagtgaaaacgtgtgtggatttactgtcaaaaaggtcaaactaaagcagagaaaggacatctgtgaaagcaacagtatttgtcttgtttcttaaactataaaatgcatttgaaaatgtacttttggaacttagtaaaatttttcacttaaaaatgattttttaaattactgtttgtaatgtaaatattaaaaaaatgaaaaggagtgctcactgactgttaatatttactctctataaaggaagtcacatttaatttctgtagatgtctggaatgtaaatctcttttagtcttttaattttagactgattgtgacatctgcatatcaagaataactaaattgttttttcttatttgattgtcctagcagcctgcttttcaatttgtcacatgctttctagcgtctttatctttaaaaaatacaatttgtttcttctgtctgcaatgaatattattgcaagtgtagaaagaactttattcagatagaaaatgtactacattcctaaatttgtgtgagccccattaagtcaaaaccttgaggcttcttttccaattgaaaagacatgaaacatacacttgtagagaaacttttcaacaaaacattgtctgagcacattttctgtatccatcttttatagccacaagtcagaatgttcacatctccttcagtatggagacacaagccacattagcggccttgggaataagcatcaggatttcactgactactcatgaaaggatacactcaatttgccaaatccatgagaaccatacagagaagagctaaaaagattaggggaggcttgggagtgggggtaggtaatctcttgaagacagaataaaaggattaggactcttgtctagaaagacaaagggtaattgctacatatctgatatctgtaaaaaatcatccccaaaaaatctatatagagagctgagacaagtaaggatttcttaagtaaatcataggatactagaattgatgaggacaatagaattaagccttaaattagaaccttatgaaagcattgtaattgtagcactttgggaggcttaggtgggtggattgcttgagcccaggaattccagaccagcctgggcaacatggcaaaaccctgtctctacaaaaaaatacaaaaattaaccgggcatggcagtgtgtgcctgtagtcccagttatttaggaggctaaggtgtgaagatcacctgagcctgggaggtcaaggctgcagtgaaccgtaattgagccactgtgcttcatcctgggcgacagagggagatgctgtctcaaaacaaaaaaaaaaaaaagaagaagaagaagaagaaaaaaaaagcagcagcagcttatgaaagacaggttttcaaaagatttaaaatattactacagcaggcagcagcctttagcttagacaactgattattcaaagaggtgatacaatataaaaatagattaggtaaattaatgtgtgacagattcaaacagctgccaaagagatgtagcaggtttcagacactgatcaggccttgccctctactcttctgtcatccaaaaaaatatggccagattagtatccctaaagcacatctctgaggatacctttctctatcccccaaattctcagtgatttaccaaaatatgcaaaataaagtctgaagttgtctgattttgcatgacctctggaccatcccaatctcctgtagtcccctttacatgtcctataatctagccaaactcaactactgcaatttccttaattgcaccccaaatttcccatctgtttcctggatcttgccctcttctttactcatatgccttttcctctactgccacaggtaagaatcctccccagtcttctaaccccaactcaaaggccagcttctctttgacattgtctctgatcgttcacttaaacttccttagcatcttctttgtgtcataacaattattgatttatttatttatttatttatttatttatttatatatgtttgccttttctctaccttctattcctttccctagatatcttctgccctggaacttgtctttgaacctccctttgtagaccccctggtacctagtgggtgttcattaaactcttattaattgaatacttttctcccggtgttaaagttttatgaatatttattttcttttctacagtcacaaatcaagagttaaaggttatctgagactaaaaatgacttatttacctaaaaccagtggctcagaagatgataatgcagaacaggctgaggaattagaggtgagattttataaatatttggttaaactaaaaaaattttaatttcttattttactgtactctgaagaacaataactattgaatgaagttaacatgtgcaatgaagattatttacttggatgtttatttcacccaagcattaatagttttccctctaaggatatttctgtagaaggaatggccattattgatggccttcttaaaggttaaggagtagagaatagaatataaatctagtttttcaaagttttctaaaactgtatattctccattaaagtaagaacacaatttagtattttgaagttaaatatatggacattttgaggagactccactgattaggaactcttttatgaaatttaagtcctgttaatattcttattatggtgggagggctcataggaaaggaggggaattagggagcaaggaaaatttaagtgatctaataaagagccttctgtatgtggggcaagtagaatttaacaattttcatggatgacaggatgagaggaaagtccaagtcaagatttgtgtagagttacatgcatctggagtaagcaagtaggaggcagaaagtatgtatttggaatagaattggatagggtttggagactggaatcctagttgcacactctgtctagccagacctgtgtgagtcattgaacttttccgaacctcaggatcttgtttgcagagtgacaggatggcatcagatgacctcgagggtttcttccagcaaaaaaatttatgatttggaaaggggtcaaaaaaacacctgctcgttgaggttccctttgaaagcacattatcatcaaaaagaagtatcatttattcagtagctgtgttagtccattttcatactgctgtgaagaaatatcagagactgggtaatttataaagctttaaaaacaggtttaatggactcagttccacatggctggggaggtctcacaatcatggtggaaggtgaaagaggagcaaaggcacagcttatatggtggcaggcaagagagtgtgtgccagggaactgccctttataaaactatcagatctcatgagacttattcactatcatgagaacagcaccggaaaaactcactctcatgattcagttacctctcactgagtgcctaccacgacacgaggggattatagaagctacaattcaagatgagatttgagtggggacacagccaaaccatattaacagcagttactgaaagcaaagcacacagcgtatggcaccaaattgctctggagggttcttatttgttgccttgcttaacactttctcctctgactgagggcctgcttaggtctccataagaacagtgaagctgagggccttccccaggggctaggctctacctcacatgcccatgtaccttgagaaagaaaagctctagaacaggtagtgaatttgcagcagagctttctgggaaaattttaaatgcactaatgagattttgctttgcaggagaatctataataatagaaggaaagaccttttttttttttttttggagtcagagtcttgctctgtggcccatgctggagtgcagtggtgcaatctcagctcgctgcagcctctgcctcctgggttcaagtaattctcatgcctcagcctcccaagtagctgagattacaggcatgtgctaccatgcctggctaatttttgtatttttagtagagacagagttttactatgttggccaggctggtcttgaactcctggcctcaagccgtccatccgcctcggcttcccaaagtgctgggactacaggcgtgagccacggcacccagccaggaaagaaccttttttcttcaaatcacagagtatagatagcccctggtttggtgatcaaagaactctcttcacttatttgattaactttttgttaggtatttttctctgattttcgtataattgtttttaaagttttcaagtattcattcagtagaagtttctctacctggctttttggtgtaccagagtatctcgaataatggaattctgtttgaaatgaaggatatctgctgtaaagaaagaaaattatttatttagtaacttgaaaaaatttaacagcatttcattatttagtaacctgctccaagttttgcccacatgcacgcatcataggaccctattcacagttgagtttctgtggagagaactgcttcacttcattttgcggtctcatgtctcagtgtttgaattccctcagaatgcaccttataatttcaggagatgtaagcttgtaggagtttatttatgaaaggccctaggaattcaaacacatgaatctgtgcttatttaccttctgtgtagctaatgactagaggagtcttgcctagtcctttgacagctagtttgtgactgtatatataaaattctactatttaaggaaaacaattgtaattttgaaatgaagctcactcttaggtagtttgtattctgtagtaaagtatggctataatagataattatgtaacatttgatttttgtaccatttgcaactttagggttagttgtatgtattttacaaaattaacataaaatgttggttgtacctctgaatgctttctttctgaccctctttgacttgattaaattgtgagcaattacatattggctttgcggttagaaattaaataaggttcattgatacttagaaagttattttataaagaatagcagctgatacatatttaataggaaggccttctatccaaaaaattgactgtatagaggcattgtatccagtctttctaagccgtgtttgattgtacaactctacttccacaaatttgagacaggtcttttttaagcccttaattaaattaatttttgttctttctcttcctgaatttactcagataatataaatacattaagcagacatttaagagagaaatctctaagaagctttaaaagaaatattcttttgctaccatttttctagcactatttttataatcctttacagcagtagtgagaactattttattaataaattgtattaatcttaaaggaaaagtaatcaatggttatattcaaccaaaaaatgttaaatttatattttctcaaaagagtaaagtataaaaacttaacgtgttttgggattgaaaccagaaacatacagtctgattcaatatatgcaagactaaattttaggtatgctagatcctgtattatcataatttaagagaaaggaaaagaaagaaagaaggaagatcaacatggatgggcagacaaagtaagaggatataaggaaagaagaaaatgaaatttgggcaataaaaagaaaaaaatagagataacaattcttataaaagaggtaaaaatttaaaaaaaaaaagaagaaaggttgggcacagtggctcacgctggtaatcccagcactttgggagaccaaggcaggaggattgcttgagcccaggagtttgagaccagcctgggcaacataacgagaccccatctctacaaaaaaattaaaaattagcttgggatggtagtacacacctaaagcctgaggtggaagattgcttgagctcaagaggtcaaggctgcagtgagctgtgatggcaccactgcactccaacctgggtgtcagaatgagaccctgttgagagagagaagaaagagagaaattcccctccagaccttttctcccaaaataatttattctgtcatcttcctactccactactcgtcaccttctatacagagctagccaaactagatcagccttgctgcagaaacccctatccatttctccctgctaccaaaaaacattcctttccttcccaactcttttccctgaggcctcgttttcaggtctagccttccaacgtggaagaattctcttccatcttggaagccgtccactgcctgtcacacagcagtcatttactgctgatctccaggcctagaacagaagctctgtgtatctaaggaaattattctgtgtcagttatcaaagcaccaaaaatgtttgccactttgtcatttggtcttttttttttttaatgttaatttagtagttttggccatatacaaatgtgggtgttttgttatcaaatttatggatcttctctttcatgccttcaaggtttggtgtcatacttaacagtgtcccacttttaaaatatatttctaaaattttcaaaagtttgttactactactttttggtttcacttttaaacatttagatattattcagtctgtaacttatcctgatataaggcatgaggtaggaattcaagtgaagttttttccaaatgggtgcccattttctaagtaatctgcgtattttgccacagatttcaaatgtctttatcatattctaaattcctataaagttttttttttttttttttttttgagacagagtcttgctctatcgcccaggctggtatgcagtggtgcgatctcagctcactgcaacctctgcctcctgggctcaagcaattctcctgccccagcctctcgagtagctgggattacaggcgcccgccaccatgcccggctaatttttgtatttttagtagagatggggtttcaccatgttggccaggctggtctcaaactcctgacctcaagtgaccccctcacctcagcttcccaaagtgctgagattgcaggcatgaaccactgtgcctggccggaattcctataaagttgagtttctttctgggcaaatctattgagctgcctgtcgatgcatgcaccagaaccacacagctttaattgttgtcatttataatgtgtttttatctggtagggttgatcttcacttcttgcttttctttttaaaaattgtgctgcttattcctgcttgtttatgtttctgttgaacttgagagttgcctcgtatctttttttttttttttcttatgagacagagtttcactcttgttgtccaggctggagtgcaatggcgtgatttcggctcaccatcacctccgcctctcgggttcaagtgattctcctgcctcagcctcccgaataactgggatttacaggcatgcgccaccacacctggctaattttgtatttttagtagagatggggtttctccatgttggtcaggctggtctcaaactccctacttcaagtgatctgcccgcctcggcctcccaaagtgctggaattataggcctgagccaccgcacctggcctatttttttttttaatcataatacagttttgttggaatcttggcaaatttatagattaacttgggaagaattgacacctttgtgagactgagtcttcccagccaagaacagactatgtctttcccttatttaggtcttcttttgtgtccttttgggagcattttaaagttttcttcaccagtttatttcagtttctaatgctttcctaaccaatcagtatttaatagaatctttgacctactgccttttcttttgtgaggtttctcatataaaagcattaactcttgctactcttttctatcaattccttactttaactgccctaaggctttatgttaattttgccccttgttaatctctgagaaaccaaacttctcagtgcattttttaaaaatctttctttggctgttttatgacttgataaaatgccttgccttggtccagaggagaaagagagaaatcagacaagggaatgagaatgacttttccatcactagagagttcactgtagcagttatttctaaatcatttgccttccccatcttgcccctttgtatatttgacctttatcaaatgattttttccatgtgtcagatagttattgatttctaccgtaagcaaggtgctttctctgtaggaaagacaatgaccaataagaaataatccttgcccttcattcagttgataatttagagaacagcctaagattacactagtagtttaaactatacttctcaatttctcagtactttccaactttccgtggttgtttatttaaacgattttttgtcctttttttctattagattttttaaaattttatttttgattgacaataattgtatatatttatggaggacaatgtgatgttttgatatatacttacaatgcaaaatgattaaatcaggctaattaatctcattaaatcacctcacatacttttattacttttttgttatgaaaattttaaatagatttgttttaaagttctgttttattgttgttttgagatgggatctggttctgtcacccaggaagaacctggtggaaactttacaggcttgtgcctttaaagttttttttgaaaaatttttagacaattttaaacaaaatttaaatggttatcatttttgcaaaaagagtcttcattatcataaagtatttacattatggtcttaaaagttgaggattgtttattctgtctatgcataatttctaaaacttgatataataaatctctttttaaatttcctttagcatataatttagaaagttaaaaaaatcatgcgtaaacttaattgctgccatcctgtttttcagcctggctgggttgttttggaccaaccagatgctgcttgccatttgcagcaacaacaagaaccttctcctctacctccagggtgggaagagaggcaggatatccttggaaggacctattatgtaaaccatgaatctagaagaacacagtggaaaagaccaacccctcagtatgtgctgatggctttcacaattttaatctggaaacactttaactacgaattttcattttgaagtcatgtctcagatggattcataacagtatagtgatccataaactataagaatactaggatttttattgcccaggactttaaaaatcctaactctgctgtttcgttttttaaatgacttgataatattcaaaattacttgactctagatactacccttttaattgcgtcttaattttaataggtttttaattttatgtagccacaaatggtagatttttatttttaggctgaattagaagtcttggagaattcttgtagtttgttattaaaatgtaataaaatgttaatttctatagtactctatttttaaaatataaattatttgtaaaatataaaggactcaataataagggtattacgttaaacgcgcatttgacagtctggtcaatgtccacataacttccagcacgcacagatcaaggacggaatgactttcaacatattctaacttctgtctcctcagtgattttttttattattagactgtatatacatttataaaatctcccattattcatatttattctcaaatccccttccatttttccttccatatagtcttataaagtcttcctttagtcttctgtttgaaacatactcgtaattttttaatgtgttcattagcctcctaatttttggctatgatattttgtgcctgatatatgccaagcacttttatagatattttctgttctcaaatccttccaaaacaaatcagcaattcaagtacttcatggcacagaagcttcagtcttcatagagtgacgtacagactgcaaagctgaagacactataaaattctgtagaattgcgctgttgcatacctcagtattatggcaagccttacatgagcaaaatcacagttctttcactgtggctgatgtcattttcaggtagccaaaatcatatatttagggggaaaaaaactgaagcattcccttagagccatgtatcaaaattatgttttctttagctacggtacagtaagaactggtcttctgactagcctgagctcatgtcgcattaaataaacagtaattttattattaaatatttgaacaaaattcttgatctgatagactggttatattaaatgcaaataattagaataatataaatgactggggtaagggtgttcaatctgattttttttaattttaatttctgtgggtccctagtaggtatatatgtttgtggggtacatgagaggttttgatacaggcatgcaaggcataataatcacatcatgtaaaatggggtatccatcctcacaagcctttatcctttttgttacaaacaatccaattatagtcttctggttgtttttaaatgtacaattaaattattattgactgtagtcacctgttaagctattaaatactaggtcttattcattctttctgttttttttaatactcattaaccgtccaatctgatttattgtacctctcctaagctcagacaaatctttactattacctttttcaggacaggcccatgactgtatattacgaaaaacagataccattactaatagatatgtaattcctaaaccattaagcttttcattataaagttcttacaccatctttcattctgcccttcacattcatgcatggagtactctactcctggcttaagaccaattctagaaaatgtactatctgattcacaaagatgtatgtatgtgtaactctattactcttataataacatggcaaaataatacaatgaaataatctatgaagcgctctgatatttattcattcaacaaatatttttgagtacctatatgtgttggacattatcctagacatagtgacaaactaaaatatcaaatcagacatgttataccttttcacaaaaccttaaactccgtaaggtactctaaatataccagtctgcctacccatgattgaatctttgcatgttgaaatagcctttggtcaaagacaataaatttttttattgatgtaatgtagatttttttcccaatgatcacagaatctttgacaatcattttaactacttaagacatggatgatggctttttatacttccaatatagggacaacctaacagatgctgagaatggcaacattcaactgcaagcacaacgtgcatttaccaccaggcggcagatatccgaggaaacagaaagtgttgacaaccaagagtcttccgaggtataagtagtttcctagttctccttgaaagacacatgctatagcaataaagtatgtgtggctcaagcttattctgttcattttagaactgggaaattataagagaagatgaagccaccatgtatagcagccaggccttcccatcacctccaccgtcaagtaacttggatgttccaactcatcttgcagaagaattgaatgccagactcaccatttttggaaattcagccgtgagccagccagcatcgagctcagtaagacgctcttagattttgttacggcttcagtagtttatattatgcatattatactattcaacaactaacttttatgtaaaattttgtcttaaatgcaataatatgtaataatacattagggaccttgggactttacaacatggtcatttttcaaatatcctcattagtagtatggaccagagtcatggcatccaaatttccattatgtcagtgccctccagtcaaaaatcactagggacacatttgtcattgaacaagttgggtttattattcatttcagcaagggagaacacgcaccattggtgttttggtagcagaatgttagaaaagacttcagggatttgggctcctgttaggtgattttgaagagggttttaggaagcaggactttgctctacatgagatgctgttgggaagcagggataattctatgattttgtatctcaaatcttatctgtagtgaggctaaagctatgattagcaaagtagaacagtcactcacatttgccaggatggggaaatgtttggtattttgtggcttggacaatgttcatgttttgtctatattcagccacgattacagagtggtcttgattttgtcttgatcttacctatgagtgccaggccagctcttggatgttagggactgcttttctctctcccagttatgctgaagttggttttttgtttgcttgtttgtttgtttgttttgagacatctcactctgtcacctagactggagtgcagtggtgctatctcggcttactgcaaactccgtctccagcttcaggcgattctcatgcctcagcctcctgaatagctgagattacaggcgcacaccaccacgcccagctaatttttgtatttttagtagagatggaggagtttcaccctgttggccaggctagtcttgaactcctggcctcaagtgatccacctgcctcagactcccaaagtgctgggattacaggcatgagccactgcttctggcctgaagttttaacattatatcacagatgtcaccaacaggtatatatgaataagaactgatatactttgactaaacaaggagatagatgacattttcacttcagccaccactgtaaaaactgttgtccatagggttcagaataaagtatcccagcatatgcttccacgatgagaacttcatagctagctgtctaatatgtatcatcaagggagattgagtagaagacaaagattattctctgaggatgctatttgtcatttccagttgaggtttccctgcctttcatttagttagtaaatatttattgagagctgatcacatatatgcagagtactatatgctagttactgaggatacatcagtcaataaaattaacaatatctcctgccttcatgggacttacattctagtgcagaggaaagcaaactacaaccggtgggccaaatcagcagctgcctgttatgaataattaccattggaatacagccacatcatttgttttggtattgcccatctctgctttcacacgacatcatctgaataaagtagttacagcagcaaccatatggcccacagccagtatttactgtctggatcttaacaggaaatgtgtgctaacctctgctctagcatcttcttcaagaagcttcacagtagatagttgtacgtgaatatgaatatctgccagtaaatccgcctgcctgcctcctgcccttcctttcttccatttgtctgttctgtcttccattcatttcattttttcacaggggagtgggacaggtcagtcaaagacctaaactacattaggccaggcgtggtggctcacgcctataatcccagcactttgggaggctgggattatagatgggttgaagtcaggagttcaagaccagcctgggcaacatggcgaaaccttgtcactactaaaaatacaaaaattagctcggtgtggtggtgcacacctgtaatcccagctacttgggaggctgagattggaagaatggcttgaacccaagaggcagaggttgcagtgagccgagattgcaccattgcacttcagcttgggtgacagagtgaaactccgtctcaagaaaaaaaaagaataaaccatattgatttgctgatgataaatcacatacgatcccattccccttcttcctggtattttttttacttaaagtaatacatggcaaccatatagtgtaatactatgcagccattgaagagaacaaggtgggctcgagtgtatatgttggatggaacaatccctaagagatgctggtaaatgaaaaacagcaaggtacagaacagtgtgtttgttacaccagaatttatgtaaattatttaaatgcagagcataaatatgtgtataatttactcgaggactaaacaggaaactaataactttgcttgcctctgaagagaggcaaagaatgagcaggatatatattgtttgtaccttttgtttttttgagatagggtctcactctgtcgcccagtctggagtgcagtagcatgatcatagcccactgcaacctcaaatttctgggctcaagggattctcccacctcagcctctggagtagctggtactacaggcacatgccattgtacccctgctaatttttttaaaaaatttttgtaaagacttggtatagtattgtttcccaggctccttttgaattatataacatgtatgagtgttacctattttaaaaaatatttttaaagcactgtatggttatggttacaaattgagattgtatttaggtatataaaataaaatttaagactgggcatcttggctcacacctgtaatcccagcactttgagaggtcaaggcaggcagatcacatgaggttaggagttcgagaccagcctggccaacatggcgaaaccccgtctctaatacaaaaattagccgagtgcagtggcgtgtgtctgtaatcccagctactcggtagactgaggcaagagaattgcttgaacctgggaggtggaggttgcagtgagacaagatcgcaccaccatactccagcctgggcatcagagcaagactctgtctcaaaaaaataaataaataataaataaaaattaaaccttctatcttaccactaatatatgctccctcagttactattagtggtcaaagacctaaagaataaatgatactgatttgctggtgataaatcacatgcatacatatatagaaactttttctgtatattcataaacatgcatgcatacacatatatttgtagatgattttttaacctgagatcatcttaaacatactttttggtaacttgcttttttcacttgctgtctcttagacattgaaccatttcagtacagatagatgtactcctttaaaaaccaactaaaacagtcattaaactctggcatattccattgtacaagtaacccttaaggcatttcaccagtctcctattgaaagactttagattgtttacagtactattataaacagtactacagtggatattctgattcaatttgtatgtgcattgtaaattttgatgtcattaaataacaaaactaagatatttcagatagtgataatagcatgtatagaaaaacataaggaaagaaagaacatgagatttccaggaaacaagtagtctggaatgtccagggggtagattgcgaagtgggaagtggctgaagaagtcaggaagaggcaggtcgtggtgttcaggaagcattgttttctgtgttgtcattggcttcagctccagaaggacaggactggctgtgcattgcaggatgctctgagcctgcagcgtgcagcatggagaatggacttaaggaagtaagacttgcaacggggaaacctcttaggatattgctgccattgtaatcaaagtgacaaaagatgaaacttgaagttaaaacaacaataaaactagtaactaaagtggagagggagtgtatttgagaatggtttctgtgaaacattcaagagaaggtgtccaggaggcagtccagcacggggggcatgggagctggatgtgtgaaggtgtccacgtagggggctgagagcgaccacatgactcagcctgcactctcaacatttgcatcctagccagccttctctcttctgccctgtcatatttaccctcactaccttagctgtcactcaaaggcaaatcacaaatatcaaggtattcttctgttgtcttgttttttcacaagaatcattccagcagaagaggcagcttacaagcctatacttttgaggaacaacctacacttcctgtggtgagttttaccctctcccatcaatcaataaaaatataaaactcagcatctctttttattttttggaagattgagtgtgaacgtttgccttacagggagccaatacagcacagaatgtaggctccaggtggtgatgttcagggaaggggcttaaagacaaaacatggagaaccgtctctcccatgttaaaagcaaagtctctgcatgctggtgactgtgggtggtatctgggcttgtcagttgaagtgctgtgctggctagaggtgatccgctgcatacggcatacaattcaggatcactgtgtccatttgctgatgttctgcacatgcacatggcatccagcagccatgtctgccctgtacatgaagaatagccagggtttcatcactcaggcgtgcactggcattcacatgcccggcagccaggctggagtttatcagtccttggtctgtttcttccctgcaatatcacatccatcagtctactaaggccttctgcttcctgctcagtgctgtcccagccacagcctggatggcagcttggaccttaaccctgcctccatcctcttcctaacacaagcctcactactgagtttgtctctgttttccagaagccctacttgtttttgaaaccaaagtaaaactcccaggctcccagcctcttcagcctacccttctccttatcccccaacagaagcctcctgctgccttcattcctgtctatgctttttcttccaagcagactgttcccatgtcctgattctctcccgcttctgagtctgtgtgcattccatttccccacttggaatggctttctcattttcttccccaaccatctggaactttgaatggcagtctagatatcagctttgaaaagtagggtatgttctagcacaggaatgcagagtctccaaaatcctcatcccatgagtgggttatctgtctaaataacaccctgcactaagaaagggacacagatcctgtgctgaggaatgagaggtcgcccacctatgcatcattgctctggtcagtactgaccatcaacaagaggacagatgccattgaaagactatcatcgctagccttactctcactcactgtcatctgtccagcctcctccattagatcagagcccgctcaagctgagttccatggtgtttttccctctgcacgttataatgtcctctatacaatgaatatgtggaagttctcattgactgacagacattcacccaagacacaattttagatggaccggatgagcagcagaatctcgagatgatttatattttagtaccagaaaagttgtttccatgccttttttttccctcaatacattgattggggttttttttaagagctttcttggagtataatttacataccataaaatccacccatgtttgatcatacaattaaagagtttttgtaaatttatacagttatggagacatcaccacaatcaagtttaagaaacttctgtcacccccaaaagttccctcaatccctatgcctactctcagttgcaagcaaccgctcatctgctctctattgctacagtttttgccttttctagaaatctcgtgtaaagggactcgtagggtgtgggcttacgtgtctgacctttttcacttagcatgctgtttttcacatagacccatgttattgcatgcctctattagtgcacggtattccactgtagagatatatccactacatttatctattcaccagctgatggacacttgtagaactgggcagcatttaaatgcatcattttgtgatgtatcagctcatcacaactgtccccaaagtacgtaggactcccgtgtatttagtaagtggtgtcttcattgtagagactggtggtgatggtttttatgttgtaagccaccttagggagccacaccaaaccagggcttatctggttcaaaatgacaacaggaaggccagatttaggacttttttttttcggaggggagggggatggagtcttgctctgttgtccaggctggagtgcccaggcgatctcggctcactgcaacctctgcctcctgggttcaagtgattctcctgcttcagcctcccgagtagctggactacagacgtgcaccaccatgcccagctaatttctgttattttgagtcggagttttgctcagttgcccaggctagagtgcaatggtgcaatctcagctcactgtaacctctgcctcccggttcaagcagttcttctgtctcagcctcctgagtagctgggattacaggtgcccaccaccatgcctagctaatttttttgtacttttagtagagacaagttttcaccatgttggccaggctggcctcgacttcctgaactcaggtgatccgcccacctcagcccccaaaagtgctgggattacaggggtgagccatcatgcccagcctggatttaggactattttaagtaagcctggaaataaccagacttctctttattcatttgtaacaaactatgataaatagcattctcctagcttttagagaaacaaggcaggagtaactgttgattcagcagataagcatgatttctgttgttagattacctgggttcaaatctcagctccattccttagaagccatgtcgcttaacaagttacttccattactctcggccttttggctaagatcaagtatagtaacaagttacttccatattgtaagcttctgtttactcaccagtaaaatgagccagtattagtaattatctcattgaaattcaggtgggaagtaaatgacgttatctgtgttaaacaggacacgtgcttgttattgttggtatgttttattagggttgttatcactctcattattattgttctagtgttttttttcccaagtgaagtactgtacactttatcttgcacattttaagatatttaaaatgtggtttatttcactaaaatgtataatttacccatttttattataatacatggttttagttcaaaataaaatataatttgttttaaagcaaacaagtagtgaagaagggatgtggtgttttttaaaggattctttcttattaatatttaattcttctggccaggcacagtggctcatgcctgtaatcccagcactttggggaggccaaggcaggtggatcacttgagattaggagttcgagaccagcctggccaatatggtgaaaccctgttgatactaaaaataaaaaaattagctgggtgtgttagcacatgcctgtaatcccagctactcaggaggctgaggcacaagaatagcttgaacccaggaagcagaggttgcagtgagccgagatcataccactgcactccagcctgggcaacagagcaagaccctgtctctctctgtctctctctctctctctcactctctcagaaaaggtaaatatatatatatatatatatatatttctagaaaaggcaaaactgtagtaacagagcagatgagtggttgcttggggctgagagtagacatagggacagagggaacttttgggggtgatagaaggattcttaaacttgatgtatttaattcttctgttattcttcactttagcttttgcctacttcatctggattaccaccaggttgggaagaaaaacaagatgaaagaggaagatcatattatgtagatcacaattccagaacgactacttggacaaagcccactgtacaggtatcctgtaatctatcaacttgctttcttacaggatttaaactgtcacatccctatgtaaactattacatcactttgtaggatacactggatacttctaccaccttcttttttttttttatttttttgagatggagtctcagtattgtcgcccaggctggagtccaatggcgtgatcgtggctcactgcacctctgcctcctgggttcaagcgattctcctgcctcaccctcctgagtagatgggattacaggtgcccgccaccacacctggctaatttttgtatttttagtagagacagggtttcaccatgttggccaggctgatctgaaactcctgacctcaggtgatccacccacctcggcctcctaaagtgctgggattataggcatgagccaccgtgcctggtcatagcatcttctaattatttatattctgacactgatgttaagtgtctaccttttcctatgaatctctaatatacacgaattaccacttgttattatataaaacaagtacaaatgagaataagaggaaaaagcaaatgatctcgtctttgggtatttttgtaatttgaatagttaggatcattattttaactaacagataatcttggcgattgggatctattaaagaagtttatgctgggccgggcaaggtggctcatgcctataatcccagcactttgggaggccaaggtgggaggatcacctgaggtcgggagttcaagatcagcctgaccaacatggagaaaccccatctctaccaaaaatacaaaaattagccaggcgtggtggcgcatgcctgtaatcccatctacttaggaggctgaggcaggagaatcgcttgaacctgggaggcggaggttgcggtgagccaagattatgccattgcactccagcctgggcaacaagagcgaaactccatctgaaaaaaaaaaacagaaaagaaaatgtaaaatattgtttatatgcctgtgtttctaattttgcaacgagagaacactcattttattttatagaatgaggtgctgcttgataaaaaaaaaactttgcattgatgttgtggccctgtaagtctacacctttttgcttaacattgttttaaagctctgtccatgttgttatttatagatccagtgtatttctcttaactactaatattccatcatgaatatattgcatttcaattatccatttctgtggtagatatttgccattcattttgtctgcccatcatttgaatctacttctgtgtatgaggaattccccatcctgtgagttttgggaaaacaaagacgacctcctcctataggcacgagagctccccttgcagctagggcttgagcttgcagacctcgctccttcagtcagatgcacccacagcatactgttaactaacatcttactgcttgagaattagttgaaaaattataaattactgtaaaaataaagttttacaaaataatttattggaaaaatgttattaaatgtaatgcattattgaaatgttgggaaaatattaacatgccataactacatttgaaaatgagcctcaaatatttagagtctctttaatggagggtgtgtattctatttgcaggttaagttacctttttaactacatctatttgtgagttctctctataaaatattacaatatgatttcattaatgtgctaggccacagtggagaccagtcagctgacctcaagccagagttctgcaggccctcaatcacaagcctccaccagtgattcaggccagcaggtgacccagccatctgaaattgagcaaggattccttcctaaaggctgggaagtccggcatgcaccaaatgggaggcctttctttattgaccacaacactaaaaccaccacctgggtaactttgatacttttccatttaaatttataacaacaataatcatctcttatgtatagttccttaaaatctttaagtatgtattagtataacctatgtttcctaatattcattgaaaggtatattgaattcttaataatattatttgtattcaggagaatgcttatgcgtctttttaatattgttttggattatgatggagatattcatgtttacttcctatttccagtttttagctcactagccataaatgcttaagaagatacataggaataatcctttgcttttatatgaggctttatagctccaaagcacttttgaatccatatctcatttaatatcaaaaaaaccttgtgaggctaggtagaacaagtatttttattttaagataaggcttaaaattgtttagtgcttggcttactactaatagaaaaattacctaaaggccgggtgcagtggctcatgcctgtaatcccagcactttgggaggccgaggggggagatcacgaggtcaggagatggagatcgagaccatcctggctaacatggtgaaaccccgtttctactaaaaatacaaaataattagtcaggcatggtggcgggtgcctgtagtcccagctgttcaggaggctgaggctagagaatggcatgaacccaggaggcggaggttgcagtgagccaagatcgcaccactgcactccagcctgggcaacagagcgagactccgtctcaaaaaaaaaaaaagaaaaattacttaaaattagcagcagatgaatatattttaattaattattaaaagaccaacatagcttaaataatactaaacttatttaataaattaataatattaaaataatatatataaattaaaccaaataaatttaattttgttctcttttttaacattctgaattggcctttgataacctttttgggcttaccttcctgttattcaaaaatattaatcgacccttgaacagatagctggcaaaatgcatgttctggggcttagaaatatcatgtggtccagggccaggcacagtgatcccagcactttgggaggccaaggcgggtggatcacctgaggtcaggagttcgagactagcctggccaacatggagaaaccccgtctctattaaatatacaaaaattagctaggcatggtggtgcatgcctgtaatcccagctactcaggaggctgaggcaggagaatcccttgaacctaggaggaagaggttgcattgagctgagatggtgccattgtactccagcctgggcgacaagagcgacactccacctcagaaaaaaagaaagaaatatcatgtggtccaatttaatgtcctactctttcaccagtttttacatagagaaaagccctatatagtgacacatttcctaaagagcggggcaaaagaaatgaccagttagtggtgatccctgagaactgatcgttattccttttgatattatagcctgacagtgatagattttagaaggagaaaatattgtgtcacatatttaggaaataaagtataaattgacttttacaagagaatattttaaatatccattgatgttagaaaacatggtaacagactgactttgattattttaaaatttgtgtgtattgttctttatttactctaccaaaaaaggaagatccaagattgaaaattccagcccatctgagaggaaagacatcacttgatacttccaatgatctagggcctttacctgtaagtgtatagaaatgctaacccatctaacttggctatctcaaatattttgcattttcgggtatagtatttctttatcatctataattaatgttattattaaaatgttgataccttctaagaatggaatggaatatgcaagttaaattaaccatacaaccagtgctatttttctatccattcatctacgcccctctcctaaaataattgaaatacatttttaattatagccaggatgggaagagagaactcacacagatggaagaatcttctacataaatcacagtatgtgcagtgcgatttttcattatgttattttttgtaataaattttatgtgtgagaaagtacatcttttttctttttcttcccttcagatataaaaagaacacaatgggaagatcctcggttggagaatgtagcaataactggaccagtaagtctctctgccagtgtgctctgatgggactgtccgctcacctgtctcttcaagagcagatagtcacgggcataaccctacaggcattgagaggaaagcacattggccgttctctcctctcccccatttcccatactccaagtctcagttatttgaaaagattctataacgtcattatccttaccctacgcaatagcagtgaggggacaagtgagccagacagtcagaatgctaaggcagtgtgggctgctgagctcaggctggtgcctcccactgtctgaacaagaatgatgacagtcctccacaaatcagagaggagcagagagtgtatgcggatgaggaagcagcagcaccctatccactccagggtcattcttaaatttttttatagaaatcaagccaggctcacacctgtaatcccagcactttgggaggccaaggcaggtggatcacctgaggtcaggagttcgagaccggcccggccaacgtggtgaaaccctgtctctactaaaaatgcaaaaaaaattagttgggcatggtggcaggtacctgtagtcccagctacttgggaggctgaggcaggagaatcacttgaacccaggaggcggaggttgtggtgagctgaggttgtaccaccacactccagcctggacaacagagcgagactccatctcaaaaaaaaaaaaaaaaggaaaaagaaaaagaaatcattgtaaatgcccagtatgtaagacacatccacacttaagtataaatattaccacgtatgataattgtactactcttgagtcagattgataggaaaattatccttttttatagctgctttttccattttattcagattttgttttctaattcataaaaataaataaaactgaagataccgttttttattactatttactgtctcaacatgtagtcctttaatggctcaaaaaggcaactccttggagttcaaggaaaaagtacgcttttcacattgtccctttaatggagaaatcactttgaaagtctctttagaaatggaaatttttgtttctaatatttctctacctggaagaaatttcctatttctggcatgctgcattttaagaatattgcataatgaaaattacagccataggaattgctgaatacaattttatcttaaacagagaaattaaatattttaaagtttaaagttttgtatttgtttttcttctaattaaacttttctttccaaatatttttcttttaatgcccttacgttcataaaatacaacaaataaaaattgttccagaataaaaacaacctaaacttctttatttttccaaaatttccaactaaaggcagtgccctactccagggattacaaaagaaagtatgagttcttccgaagaaagttgaagaagcaggttagtcatgtttgtaataaatacttaagagtcatcaatatatagatggaaagtaatgggaaatgttttttacagtaataatttgttctatatttgtaacaactttgagtgaacagtttttcctagagaaaggatgctcattttttgagtagctgtgatatatcactacagaccataattagtttatgtctttatttttcagtatattttataatatagaaaaatggcatttaaagtttgctttccagagctctaacctggtgtatccctgtggggtttatggggcttgatctttgtagaatctgagcaagagtgggtcaggaaattatcttctggcctagtctttgactgtgttggaggacggtctggatttttttatgactttgttgttttccagcgaaagtcattcattctctacggcttcaaatgtaatgtctctgcataatttaaaaatacaatcatgagtggaactgtgctcttgtgacttgtctccttatgcttatcagttatgttcactacactttttcccatcgccacaaatgcaatatgtttggaactaaactcatcatctggccatctgtttcattcctggttttgtttactagttttaacgcctctcttacttgctcatcctgtcctcctttgcctgcagtttaggaatactaccactaggtggccatattgggttatactttcttgcattctaagccagaagctggctttcacaaatattcaagatagtgggtgggctacctcagagtttcacccaaatttttagcaaaaagaaaacatgatagtttttttagtgtaaacattttatgccctaataaaatccttaaatatcataaactttctaaactcatttttaaggataattttgtgggccaggtgcagtagctcatgcctgtaatcccagcactttgggaggtcgaggtgggtggatcacttgaggtcaggagttcacgaccagcctggccaacgtggtgaaacccccgtctctactaaaaatacaaaaattagttaggtgtgatggcgcacacctttaatcccggctactccggaggctgaggcaggagaaccgcttgaacccaggaggcagaggttgcagtgagccaagatcgcgccactgcactccagcctgggcaacagagtgtctcaaaaaaaaaaaaaagaaaaaagaaaaaaagaataactttgtgtcgaaatttccctggaaatttgttttctacttctagactttgggattttaaatgtttactgatttattgttctgctaaatattttcattgttaatgagaatacgctggaggaatagaagcactagcttctccatttgccactctgagtggttgaaacatgttgtagtatctaattattaatgtcttccaggcagcaggagatgggagacaatgccattacaggcctcaaaatacaaaaaaaaaaccatgataaaagcaattatatttgttgatctctcattgcataccaggcattcttcttagaagtttacatatgttattcatttaatgtctacaataactctgtaaggaagggactactattacctttcacagatgaggaaactgaggcacagagagaataggtaatgtgatcaagtcccatggttattaagtagaaaagctaagtggtctagctccagatcccatgttcctaagcaacatgacatgtcatattggtgactaagagaattaagagagaaattaattaatttgtatggaaattacccagaatgcaacaaaggtatgtaaggggataaacatataaaagaaaggttaaaagacatgaagtcaccccagaaggaggggaccaagatcatgaagaggagaaggctaagaatatgaattctcacattagtaaaaaggcccaagcagtactttaaaaataaaatctgtatctagacacatcatagcaaaagagcagaacacttagaatgtaagaacatgtaacaccaaaacagaaataaagaatattaaaaacaccaggtgcagtggttcatgcctgtaatcccagcactttgggaggctgaggcaggagaattacttgagctcaggagttcaaagctgcactgggctataatcatgccactgcactccagcctgaatgacagagcagtactctgtctcaaaaaaaaaaaaaaaaattgaaaaccggtgcttgaaagccgtgcactgtctttaaccttttcctcttccttatcctcaacatcttgtagttaggaataatgatggctaataattaccatatgccagatactgtttaagcatttttaatgcatggagttgaaacaactccatgtgggtagctatcattattattatccctattttatagatgaggaaactaatccttagaaaagacatgtaacctgcccaaagtgtcactcctagtgaatggtggagtcaataacacaggaccagattccagaatgcatgcacttgtctactactcagttcaaacactgaagttctcttgtacccccctcttcttccactaccattgctccttcacaggtccctctgtcttctctcactcagctattccaggggtctttaactgaccagtgtgcctcttgtttctcctctttaaaaccaccctttacaccctgtcctgtcagcttctgagaacccagcaatctgaccgtgtggctccccaacccagaaactctcttcttaactgcattcacactgtccaccctctggccccagactacttttttgcatttttcccctataatccctgccttctttcccttcctctcccttcttctccttctgtgccctctaggtattaaatatatcagacctctcatgtatgctgttcctccgtccttccctccctttctctgtctaaagacttcctctcaaagccttcttgattgcctcatttgaagtcaatagctcagtcttttatgccctgcagaacattgcttccatctctatcatcagcaattgtcctcctattttaagtctcagaattagcatcatttacacttgtttttcacatatacgccagatgagaaactccttgaggaagcaaggacatcttaccctatgtttttattccctttattccccatcgttggccctactacaataccacctggcccagagtaggcctttgataaatgcttacctgcaccagctgcctagtatccagtctaaagttgctgttctgcaagcttaccatttttttaatgacataagcagtataggaaactgctcatatcatgcttatattgcttatatcaactgcttacattattatgtttctatagggctttccattttccctaaataaattgagaatgaaattgattttttttccttagagctaaccttcttttttggaggtgacagaatattgatggcatgttttctcttactggtttcccctggaaatttgcccatgaagtactgaggaataaaatatttagatatatcttttgtaaaatttacaataagttctgcctaaagcatagttgtgtacatttgtcacataagcaaagaacgtacaaaagattagtgaggcaatgtagctccattaattaagagcacagactcaggagctaagactttcttaagtcgtcttcttcagttttatgtgtaaaatgaagacaataatagtagctttcgcatagtgttgttatgaggttaaacacgttaacctgccattccagggtacccatgcctggctgttttagtccgttttcatgctgctgataaagacatacctgagaccaggcaatttacaaaaggaagaggtttattggacctacagttctacatggctagggaggcctcacaatcatggcagaaggcaaggaggagcaagtcacatcttacatggatggcagcaggcaaagagagagcttgtgcatagaaaccattagatgtcgtgagacccattcactatcatgagaacagtgcaggaaagatccgcccccataattcaatcacctcccaccaggttcttcccatgacacatggagattgtgggagttacaattcaagattagatttgggtagggacacagccagaatatatcactggcacagtctgtaaatgtcaccatctgttaatgagtgaagcaagatagactccagggaggaaagtagaggtagggaaaagcctgaacagacaggcacaacagctagcaggcagtggctatcctacaggtcacagaacggtgttcattggaacttaatatgaaaaggactgttaacgaaatgccttcatgggggcattaccatcaccatcaattgcttctttaggccgggtgccatggcttatgcctgtaatctcagcactttgggaggccaaggcgggaggattgctagagcttaggagtttgagaccagcctgggcaagatggcaagacctcaaaaacttaaaaaattagtcaggcatgatggcatgcgcctgtggtccagttacttaggaatcggaagcaagaggatcacttgagcccatgaggtcgaggctgcagtaagccatgttcacgccactgcactccagcctggactacagagctgtctccaaaaacaaaagcttcttcagatgtaaagaagtctatattactaagtgattaaagaaaatgcagaaactgtctcataccatagaggaaaccaagacaatatacctagttgtgttttccctgagtatattacgtaaggaaaaagagacttggacacagggtgtagagggaatgttataactttatgagagatgggtttgttattatgttgaactgatttaaacagtacgtctctcctctggattttcagaatgacattccaaacaaatttgaaatgaaacttcgccgagcaactgttcttgaagactcttaccggagaattatgggtgtcaagagagcagacttcctgaaggctcgactgtggattgagtttgatggtgaaaagggattggattatggaggagttgccagagaatggttcttcctgatctcaaaggaaatgtttaacccttattatgggttgtttgaatattctgctacgtaagtacctttacaatgattatcggcagaaaaagaaaaatcactgttttaaaagtaagagtcggccgggtgcagtggctcatgcctgtaatcccagcactttgggaggccgaggcgggcggatcacaaggtcaggatatcgagaccatcctagctaacacggtgaaaccccgtctctactaaaaatacaaaaacttacccaggcgtggtggcgggcgcctgtagtcccagctactcaggaggctgaggcaggagaatggcgtgaacccggaaggcggagccgagatcacgccactgcactccagcctgggcaacagagcaagactcctctaaaaaaaaaagttaccattttagccattttaaatatacaatttagagtcattacatacattcacattgttgtgctgccatcccactatccaactctagaactttttcatcttcccaaaatgaaaccctatacccagtaagcactcgctccccattccctggcagccaccattctgctttctgtccctatgaatttgactcctcgggtacctcacataagtggaatcattcaatatttgtctttttgtgaccagctcatttcacttaacatgatgtcttcagggttcatccatgttgtagtatgtatcagaatgtccttcctttttaaggcagaataatattccattatttttgcatataatgctttgtttaggctgggcgtggtggctcatgcctgtaatcccaccactttgggaggccaaggcaggtggatcacaatgccaggagttcaagaccagcctgaccaacatagtgaaaccctgtctctactaaaaatacaaaaattaaccaggcatggtggcgggcgcctgtaattccagctacttgggaggctgagacaggagaatcacttgaacctgggaggcggaggttgcagtgagctgtgaccgtgtcattgcactccagcctgggcgagagcaagactccatctcaaaaacaaacgaacaaacaaaactttgtttatacattcatctgccaaaggacatttgggttatttccactttttgacagaaattactatttttaaaaccattaaatccagtggaggaatgtggttctaacagtggtaaacaactcttaaaggaggaagattatttgtaattatttgtcatattaaagtttttcaaatgaagtatttaaatggggttgtctttacagggacaattataccctacagataaatccaaactctggattgtgtaacgaagatcacctctcttacttcaagtttattggtcgggtagctggaatggcagtttatcatggcaaactgttggatggttagtattaagtataaactttttacaatataattacctgttttctttcacttggtaatcatcctaaatgtatttggttttttgcaaggttttttcatccgcccattttacaagatgatgcttcacaaaccaataacccttcatgatatggaatctgtggtatgtctttttcacttatagtatagacgaagtataatttaacaagcagcttgaacattttgaagaatttgcttttaatgacatggaaattaatatattatcatgtttcaaaatacaaatgaactttttcctcaacattttattatgaaaattttctaacatataataaagttggaagaattttacattggacagttgtatatcaactactcacaattgctttttttctagatttactttatcacatacctatctgtctatccatcagtctgtcttagtttcttcatgcatttcagagtaagttatagataacattaaacatcccactaaatacttcaataggttataccaagttatatgtcttttgaatcagtatttgcattatgatcttttatgatgaatgttatatatatatatatatatatatatatatatatatatatatatttttttttttttttttttttttttttgagacagagtgtcactctgttgccaagctggagtgcagtggcgtgatcttggctcactgcaacctctgctttccaagttcaagcaattctctgcctcagcctcctgtgtagctgggactacaggcgcgcaccaccacactcagctaatttttgtatatttagtagagacagggtttcaccgtgttcaccaggatggtctcagtcttttgacctcgttatccgcctgcctcagcgtcccaaagtgctgggattacaggcatgagccaccgcacctggccaaatggtgtatattttttaaatggcagtcgaaaggcaaagcgttatggttaggttcctagaaaaaaacagaagcccaaggattaaaccccggactgtagccgtgttgtttcctgtgctgctgaatagcctcacacaatgtgtgttcacatgaattccagggcatcttccttagtaccaagttcattttttattcttttcttattacatattaacagcacaaacagtgtgattctttataaatcataagattgcacagttacttgagttggttcattgagcctctgtatttattaagagatttttctttaactcgggctgggtataaacaatggcctcctcatagctacttaaacatttcacacttagtgccggacacaggggtgtgcaactgtaatcccagcactttgggaagctgaggcaggtggatcacttgaggtcaggagtttgagaccagcctggccaacatggtgatactctgtctctacaaaaaatacaaaaattagccaggcgtggtggtgcgcgcctgtagtcccagctacttgggaggctgaggtaggaggatcacttgagtcaaggaggtcgaggctgcagtgagccacagtcgccccactgcactccaacctaagggacagagcgagaccctgtctcaaaaaaaaaaaaattaaattaaaaaataaaaataaaacatttaacacgaagtcacataggcatatgaggaatgtgctaagtgctcctggatatccagagaagttaggttttatctgaaaacttctgtattcattcctttaactggatgataaaatctgtacctccactgcttccacataaacatagattctaaacttttaagtaggcaccaattgattaattgattgatgcatttttactcttgcccttacctgtcatccatctctttttgtaatacacacacatacacacatacatttttgtttatatatgtgtgtaagtaaaggatgtccatctgacctctcatcttttacccaattattcagaccctctacatactgttttttgcaatttcaggtgtgttatagatacaaattttaaatatgtaatttttcccatctaggatagtgaatattacaattccctaagatggattcttgaaaatgacccaacagaattggacctcaggtttatcatagatgaagaactttttggacaggtttgtgaattttgatcagttaaaatggcacataaattgtgagacaaatgtttagatgttaatacgtacacttaatacattcctaggctctgtttttacattcatttcccagtaacaaaagctgtctctgagcaagaatttgtactttctttaacatttgactcgttccatatttattttagtaaaactagtattttaagttttcttagtttttaacttttgactggacttaatttaaaacaccaagtttctcgtataactacaatatgtatactttttaaatttttctcgctaaaataacatatcaagttattgtgtttaattttagacacatcaacatgagctgaaaaatggtggatcagaaatagttgtcaccaataagaacaaaaaggaatatatttagtaagtattttattagtaagtattttattggatataattttgtactttattccagaaagactcttcttaccatctttctctgtccccttgtccagaatctcagtgttctttttctctatcacaatgcagtagcaagcactcatattcagcttttaccttggtctcagctagcctttagtttttgtttctaactagaataattgtgcctcagaattttgtcttggttcacatgaaaatgaaatgttgtttctttttagtcttgtaatacaatggcgatttgtaaaccgaatccagaagcaaatggctgcttttaaagaggtattcattttcttttatttgctcttccataatgtcacagtataacctataagtttcaaatattaggcctcatcacatctgagaaaaataagtatatggcttgttttgtgaaatcattctaaattatatttttatattaactaaatattccattcagtcattcaagaagtctagacaataaacatggacaggtcccctttcccccaagccttttccctattccattctcttcactttaggacagcaaaagaacaagagtgctttagggatagtataacatattgtttgtttttctaaataggatcaccttacacattttgttttgtgacttactttcttctttttttttttttttgagcgcggagtgagtcactttgtcgcccaggctggaatgcagtggcgtgatctcggctcactgcaacctgcacctcccaggttcaagcaattctcctgcctcagcctcctgagtagctgggattacaggtgcccgccaccacgcctggctaatttttgtatttttagtagagacatggtttcaccatgttggtcgggctggtctcaaactccagacctcaagtgatccatccaccttggcctcccaaagtgctggggttaccagtgtgagccaccgtgctcggcctactttcttcttttatcagatatttattagggatatttacatgtgacgacatatagctgcctttctttgtggctatattttattcagaatataaattaaaaagttacttaaatttttccaattggtagacagattgtcagagtactcatttcttaagctaacttacaatcttctgttaaatatgtatctggctgggcatggtggctgacgcctaaaatcccaacacttgaggaggctgaggcgggaggattgcttgagcccaggagttcgagaccaacgtggacaacatagggagaccttatctctataaaaaattaaaaatttgggcgcggtggctcattcctgtgatcccagcactttgggagtccgaggtgggcagattgcctgaggtcaggagtttgagactagtctggctaatgtggtgaaaccctgtctctactaaaaatacaaaaaaattagccggacgtggtggcgtgcacgtgcagtcccagctactcgggaggctgaggcaggggaattgcttgaacctgagaggcagaggttgcagtgagccaagattacgccactgcactccatcctgggcaacagagcgagactccgtctcaaaaaaaaaattagcctggtgtcatggcatgtgcatatggtcacagctacttgggaggctgaggctggaggatcacttgagcctgggaagtcgaggctacagtcagctatgagctatgatggcactactgcactccagtctgggctacagagtgaaactttgtctctaaagtgtgtgtgtgtgtgtgtgtgtgtgtgtgtgtgtcacatactttttcataaattcagtattgagtactatgtgtatggtgctgtaccaggccaaaagacataggtcctgttattaaggtatgtatgatgtaaagagtgaaatgaacagaggcaagcataaagtgctaggtgagcacagaagagaagtacaaaccagggaggggcaaaggaagggacaaagaaggactagagggattggccaaccatggagaagagggaaatgcagttctaagcaacaggagcagcgtgtgtgaagtctggcaataaggtaggctgtacccacaggcagttgagtatgctgggtgagagaatgcaagagggaaacaatcagcctgcggagctaacagaccagcttatacagggcctgtgtgtgaagtggtagagttcggagttttctctgaatttcagtgagggagaaggaaggtagcattaaaggctattaaccaataagacaccaagattcaatttatgttttagatcattctggaagtgctatgtagagcaagttagaggagagccagactagcagcagagacttcccagcagagttgggaaagtgctacagtaatcttggtgagaaatggtgaggaattaagggaatggtgagggagttgagataggattggtaagggaatgaagatagtggtggtgttcagagctgcatgtgcatttgaatggcattcaaaaagggagacttaaaggatagagatgtatggatttggggatcatctgcttaagtgtagtgaagctgtgaactcgatacaatggaaaatgtgaaagggctgtgaaagcggatggcctcacatgtggagagagacctgggaacaccagcatcttaactgttgttttgaatggatggtttataaatggacagtttagggcatgggaaaaaaaaaaaaaaaaaaacagaacaggagactgcaaaggaaataaggaaattaacagaggcagacaaaaaggtatcaagagtagacagagtttcaatagaaaagatggttttaatcatatcatactgcaaataagtcaaatatgataaggaattaaatatgtttattagatatagctgcaaagccatctttgactttttccagaacaatttcaaggaagctgtagtgtagaagtccgattgcagtgggttgaggggttagatgggaggtgagtgaatggatttggtaagtgcataacactgtcaagaacttggctgtgaagggaaaaagagagtcattagtttttgtttgtttgtttgtttgttttgctttgttttaaaggtaggtatgggttgagcacatttaaatgcgtacagagtgagccaataaagagaaagagatctagtgagatgacctccctgaggagcaggtgaagcacaggtgcaggcctagcctgaaagaagaggtggcactgcggtgggaaggaggccatgatgggtgttggtgatggttgggacgcagggatggagaagcttgagggagttccattgtgcataattgcctcttttccctcaaatagaacttacacttacctactgtaaagaaggggtgatgtggaggcttgagaaggatgggaaatttgttttttgttgttgttcttgttgttttgagacaggatctcactttttgccgaggctggaatacctcagcctccccagtagctgggaccacaggttcacaccaccatgcctggctaatttttgtatttttttgtagagatggtgtttcaccatgtttcccaggctagtctcaaattccttggctcaagcagtctgcccacccagcctcccaaagtgctgggattacagaatgagccactgcgtctggccacaggaagttttaaaaatagccactttgaggaataaatgagagagaacagactgtgcacatgtacattttctggccaatattgagatctcagtgaagagcccgtgattgtgtagtggtagaaacttgtgtggatgtgggattcctccagtagcatccagaagctgaggcataggaaaggccattggccctgcccatcaagtttttaaatacatcttttttctagggattctttgaactaataccacaggatctcatcaaaatttttgatgaaaatgaactagaggtaagacataacattttatgttgaaacagaaattgtgaacccattattttccttgtttataatttgacatttcttatgtagcttcttatgtgtggactgggagatgttgatgtgaatgactggagggaacatacaaagtataaaaatggctacagtgcaaatcatcaggttatacagtggttttggaaggtaatttgaaacttctattttcataacttactttttgatagattgaatcatatttaagtcaactcttgattaactatactggtggattacatttaactgatacagaaaaatatacagaccagaaaaaattatctttgattttatactgtatacatgcaccttctgggtctgtaactattactaggtaagtaaaatgttcagaaggtagtaagtggaatgacaggctgagacaggcacttagttttctactaaagtagggactgaaagaacttgtaataacctgcagggtattcctagggactcctgggtggctcttttaaaatttctcatagagaaatatgtatgccattcaatcatattaatataatgtgttttttgagatggagtctcgctctgtctcccaggctggagtgcaatggtgccatctcagctcactgccacctccacctcccatgttcaagcaattctcttgcctcagcttcccgagtagctgggattacaagcatgcaccaccatgcctagttatttttttttgtatttttagtagagacggggtttcaccttgttggccaggctggtctcaaactcctgacctcaagtgatccacccacctcagcctcccagagtgctgggattataggcatgagccactgcacccagcatataatttttaaaagtcatgagtcacatctcaagagaaattttgttacttcactaggttataatcccattctaaaaagttgacatgtagccttagaaataaagttttcaagaactttataaaccatctataaacaaaaatttaactgaaagaaacatccacatctagtaagggattattaatattctaaattccgatagcttatgtttcaggataatttgtttacctctttcccagtgctgttccctaaatgatgtttttatcttattcaggctgttttaatgatggattcagaaaaaagaataagattacttcagtttgtcactggcacatctcgggtgcctatgaatggatttgctgaactatacggtaaggattttccatagatcattaaaaaaatggaataatgcgtattgtctttttcatggctgacgaatccgcaagcttccatcatttactaacacttagcttaattttaaaaagaattaagattttgaaagtgataccattagggacactggagtaggctaaaatatatttacaccttctaatcagataataaaggggaaaactggaaacatcaaatgacttgagtcactttccgttctttaacttcaaattctatgcccagtatgcatccgttacagaaaaagcattaccttggccgggaggggtggctcacacctgtaatcctgcacttcaggaggccgaggcaggcagatcacttgaggtcaggagttcaagatgagcctagccaacacagtgaaaccccgtctctacccaaaaatacaaatattagctgggcttggtggtgcacacctgtagtcccagctacttgggaggctgaggcaggagaattgcttgaacccaggaggcggacgttgcagtgagccaagatcgcaccactgtagttcagcctgggtgacagactgagaccctgtctcaaaaaaaagaaaaagcattacttctaatgtgatagttcaggatagcatttgaagtttcacagaatgttactaagtgtatttttaaaaaaataaaaacagagtcatggttgaatacctttaaggaaatgctggactaaacaaagttaaatggatttcttcaggacttctgtagaacctttactgttagaagaaaacaaaagcattgtttcccaaacttatttgatcatgaaatcttttttttttttttttttcaagataggggtggagaatctcattaggctactatttttcatttcttgtgggaggcagcaggactgggaagactacatatctcttgattttcagaatagttaatgcagttttcggtaaagtaagattctatgtattctatcaaattattttccagttgatgtataaaactggaagtgtgttttgtttaaaagtgccatttctgatgtagattacagcaacttttctcatattgattcatattctgtttattggaatgatatttacttgcttttaaggaaaccaagaatccaagaataaatcttttacaaaggatgtacctaaagtaggaggcctactcagaacaatgagtaagattaggattgacctggggactacaagtcgggactgctgcctaggaaattgctaagctgaattttttgtgcaaatagaagctgaccatatgatgggatagctaaacctttcttctccatggcaaatctggtcagcttgccaagcctcattaatatgagtttgcagaactgatcaagcagctgctacctctctacctagagtaaccactcaaagtggttagctttgccagtaaccaattcagtcattctttgcctaattggacttgatagcctctttctttttcatggtttcacctgactccccttcctccatcttctctactttaacaagttagtagcgaaaaatgaaggcagggcaaacaaatgcccctttccgtctctggcctctcttctctcttctatgtaacccagccccatagccatccactgatttcatgcactgtttgaaatttggggcaaatatcccacacatagagccagagttgtttgtgttagaatacaaagtcaaattcttagaatacaaagtcaaattcttatgtatttataggaagaagttatttcaaaatgttaaaattacaatattagatagccaataaaaagtatgttaaggcggctgggtgcggtagctcatgcctgtaatctcaacattttgggagactgaggcaggcagatcacctgaggtcaggggtttgagaccagcctggccaacatggtgaaaccccatgtctagtaaaaatacaaaaattagctgggtgtggtggcacactcctggaatctcagcttcttgggagggctgaggcatgagaatcatttgaacccaggagccagaggttgcattgagccgagatcatgccattttacttcagcctgggtgacagagtgaatggcttgtggccaggagttcaagaccagcctgggcaacatagtgagacccccatctctacaaaatgaatttttttaacagttagccaggcgtggtggtgcacacctgtagtcctggctactcaggagactaaagcaagaggatcacttgagcccaggagcttgaggctacagtgagcttgaatcgtaccactgcactccagtctgggtgacagagggataccccatctctaaaatataaataaataaaccagattagttccctgtgtgtgtgtaggaactagtgtacactagaaaaagttttgatatgcctggagatccttgtagagagtaaatgaaaccaaataaattcttccttataggttcaaatggaccacagtcatttacagttgaacagtggggtactcctgaaaagctgccaagagctcatacctggtaagcagttgtttggaccttgatagaacaaagcctcagagagtgagattcctctgttagtctagccacagcagggctagtctcctctgtgttatgtcggtggcaggtatggattatgggtaagaaggagttggtgacacccaacgaacaggtgttttgttaccaagttggcccaagcttgaagtccaggtagctgaagatcagagagacccacctaaactgagtgatgagtgatgggctgtcccaagacaggctagaacattccatcttggaggctgaagtggcagagaactcagacatttggaagatgtggtgggggcagcactccacaaggagttgtgcagagtatccatgcccagaacccagtcctacgtcttacttctacccctggtgaaaagacatattttggtggtgttggaacattctcatcaagaatagcagcattgctctgtttgctgtggtggtacttgctttgtcagtgtctttcataaccacttcctctctgttctttcagttttaatcgcctggacttgccaccttatgaatcatttgaagaattatgggataaacttcagatggcaattgaaaacacccagggctttgatggagttgattagattacaaataacaatctgtagtgtttttactgccatagttttataaccaaaatcttgacttaaaattttccggggaactactaaaatgtggccactgagtcttcccagatcttgaagaaaatcatataaaaagcatttgaagaaatagtacgacaacttatttttaatcacttttaaataatgtgttgcatttacacagttgtttcattctgtctttagagttaggtgcctgcctaaagccaggcaccaccacacctggctttagagttcacacaataggatataagtcctgtatgacttaaatagtgaattttgtccttaacatttacctcttgtatagtatctgccaggcagttttttcttaaactactgagatgataactgtgaaatatttgtgatacgtgtcatgtgtgaaaagtttgatgcattttgagatggaaaactgaaatttggaaaaagaaatactttactattgagtaaactacaatatatttagtgctactcgcagctatttattattttgtagacctgccttatgcaccttactgcctagatttttgggaaaaaactttggaaagtgtgttacctatatttctagccaactaactcacagaaaaactgtttacttcttcactttcgaagtatttggcttttgttaatatgcagttttactaaacagatggttcataagacatgtgaagcaaattcatatttgcaatgggtaaaaagtattaaagcctgtctcttgcctgcatatcctattgaccattggtatagtcatcactttttcatattttagtgtagttagaagaattccttcttcaaacattaaagatccacaaagcagtatttctaaatatgccttgaagaactaaatgaagtgtatagcacttgcctttactagatattctttacacttgtacaattatgtagtaaatgtatgtttacagggtttatcatgtttacagattaagctaatttctgtagtcgcatttttatatttttagtatcactctagtaaaaaaaccaaataatttgtttaaaataaccaaagagttgttataatgcataatttgtattaaatttattactatttcttatgccttttaaaatactgtttactatgaagacaatgtttttaattacaaatccagaattctgtaggcaaaatgctacagttcatatcttcctttaaccaaactgaagtacataaagaccatgtacatgtattcatcaaacgtttattgaatgctgcgtgcctagcgctgtgctatgctctggggtaagagttgtcagcttcagagaagctgagtcctgatcctcaaggaacttgcaaatgtgtctatgaatttgtaaaacaatcaaaagtaggcataagcagaataaggcaaaagggaaagtgttctaggttccagcacacctgcaaagataaagtgtgccaagactgtatttatatttcatacttatattgtttcatccttatattggaatgattatatagaaaatgctcttaaaaagattaaacctatttctcagtatggtatcttggtgatttaggaataattgtaaatatatgttacgaatcttcttaaatatatatatatacacaccctgtgagaactgtaaaaagtacctctggttcttggtttaagtttgttggggtataacatgatgagtactcattagcacctgatagaaatctgaaatgtgacagtagcaaaaccactttctactttccaaacaccacagcatcagcatggtttaggggaagcaattcacagattaatgtaccctgcgttttgtcttcaccattgtcaaccagcagtcaaggatgagcaccaggtatagtcctggtttgatatctcaccagccatgtgaactgaagcagcttacttaacctctctggattcatatttcttcatctgtcaaatgagagtaatcatgcccaccctcattgtcatgccagattgtcagaagttccagacagatgagaaagcaaaaagtactttgtaaagtgttatacaatcagaaggtgctttgtgctgaccgtcagattgtgtcaagtcaggtgtgcaaattgaccacactcccaaagaatcatttaaaagtaaagtgacttctaagagacaaggaagtaggaacatttctgatattaaatatataaataatatggatacacatgtgtatatctgtatatggatcttaccatcataattcattttcttcatatcagcaaagtaatagtaatgtgggccaatgcattttggaaatgtcctcattatgtagaatggaatgtgaaaattatttttgttaaaacaggattttgccacaattatttaaatattatgtttgtgaactatctaagcatgagaaaatacaaagctttctttgtatctggctgatactcatttggatgattctgtgactcatagaacatgatgttaaatgagaccagactcaactgccaccagtccccagctgcagaccttcatccccttcatctcccactaggggctcgtggtctggaagaaacatgtatcaagcaacacagccccttatcccagatagaaaagtgtctcaaatgcattctactgcgggacagtcagtaggatcattttcataaagcaaggacatcatatgtttctagaaattacaagcatataactttagcctacaatctcttattaaaaatttttaacaaaattgtattacaaatgcatttcatcagaactcaaatttaaatggtgtttgttttgggtttttatttataatgctgaagttattccatataagtatcaagttaaacacaattcattttgattataaactatttgactttttaaaatcttctgacacagtaaatatatatatcaagattgatgtatcaaaatttattgcacactttaaagtgtaaaatcattttttaaaatcttgaatccacaaataaagttctattctgattttaaaaaacaaaacaaaactgtggttcattataaaataggagtgtttccaagtcagtatgctgggtgatgtcttctggtctagttcctcacagcagcacgttaaattttcagtgcaatcctaaacttattacctgatgaactaacatgattataaactctcaaccacagataattaatttccactttacaaaaaggtcgtattgcataagtctggttgttagtgaaatagccagaagataaaaataatagctaaaaatggactggatttcaggcaccttgctgctcatcaaagaagccattcttgtagccaaccactatttacaacatcatttctatgagaaaaagagttcggagtgttaattcagaacgaagtgtcttttcctccttcctctcaggcatgagaattagtttcccagttagaagggaatccactcccacccactcaagccagcctgggaaggtgctgttccagccccctgtttctgccataatccaggccatagcttttaattttggggacctaggccatggccctctgcttccacgtttcctgttctagccaactcgggcagcagctagcccacagcatgccccacctgtacaagaagtccttgctttgctgtccatcacggcagacatttattttataaatgatattaaactaaggtataagaatgtcaggacctcattatgaagaaagagacttagtagatttttgtctttttccttgaaagttaaagcctatcactacactagcctcctctttctgttccgctcatctcttcccctgcaatgcatcctatgcagtccctccatcacaatcagtgtttcctttttagcacacagatttgatcaggttactgtaccgccaaaaaacctgagagctccccagagccaaaagcatgaagcacaaacccgttagcatggaggttcgcatggaatgcagtccatcctcagcctaaggtctcaattccaccttccatcatacctcactcaggtgcccttggttcccctccaaatcagagtccttccagcccctaatcactgcagactccggtgccacctgaatgctttcacttctcatgtctacttggtaagtcactccactttctggacacagtggaacggtgctgtggcctcagcagttggtatatactagtgcggatgacactgcattacaattctttgtttacataattctgtcctacagacttctgggcagtttgaggacaaagacaattatgtatccatctttttcatatgttcatttcccaatgcaaatatttgacgaatttgagcttaaaagtactgtttgtgtatagaatccatttaggagcatggtgtgcctggaactgcaataatgtgcaggagctctgtagttaggtggacattggggactacgtaaatattcaagcagagagggagcttgattgagatcctgctgagtgctggattctgcagtaaacactttatgtggatctcatttaatcttcataaaaactcagtgagacaggttttataggctcaaggacaagtaatacacctaaggccacacagcttgtaaactcagtggatttatgaaccacaacaaagaaaagctatggaatccaacaaattaccaagatgtatccgttttcttgggctgcacaacaaattgccataaacttagcagctaaaaacaatacccatttattatctcagatttctgtaggtcacaagtgtacatggtcttagcttagggttctctgctcagggtctcacaaagccaaaatcatggtgtctgggctcttgcctgcatccaagatctttccgattattggcagaatccagttcccagtagctgcaggtctgaagtccttgttttcttgctggatggcagctggggggcactcttaactttcagatgtcacccacattcctcatggattggccctctctccctcttcaagccaacaatgcctctcatgcttctaatctctgatttcccattcggctgcccttttctgccaccagacggagaaagttctctgtgttccaagatttatttgaatagatcaggcccacctgaatagtcttcctttttggaaattgactgtactggccaggtgcagtgactcacgcctgtaatcccaatactttgggaggccaaagcaggcagatcacctgaggtcaggagtttgagaccagcctgaccaacatggcgaaaccctgtctctactaaaaatacaaaaattagccaggcgtggtggcgcgtgcctgtaatcccagctacttgggaggctgaggcaggagaatcacttgaacccgggaggcggaagttgcaatgagccaagatcgtgccactgcactccagcctgggtgaccagagcgaaactccaactcaaaaaaaaaaaaaaacacgaaaaaaccatctcagagaaaaaaagaaaattgtaccataggcgcagaacacagtcatgggaccaagatcttatcacgttcataaacagcatagattaggaggatgagatatttcctagatcattactagaaaatcctgccttccacacaacataaaggctaaggatagaaaagttaaagattatggaggttcaccttgaaaaacacttatgtatatctaattttataatgtgcgttcatttttccactctttgtcaatgaaaggccagctaaataaactaatgctaacaacagccggtaagattccacttcagcagctataaattcacaagtcactactctcagatgagccatcaattcatatttttctcaataccagaaggttgcattggcctgaaattatattcaactcatccttacaatcttgcttcttatacaagcagaaatgaaaagccataattgctccttttattgggaaggttggtgtctttccagtgaaatcatggtcaggattataaggtgggtccaaatcagactacagccatgatgggaagaaagcagttcacagcccagagctgctgaacattctctgcagatgtgtttagaactgctttaaatctctggagagatgtgcaagggagggcctccaaacgcccaagtaaatgaaagttcctgtgcaatcacatgaccctggaacaaagttttttctcctggtgaaattaaccaaagattaaagccataactataggctcatgagttatactctattcattatttaggtcctgacttaagttctcttctgaaaaataatcaattattataaaggcaaacatcatgccttcttaaaagttgtttttctgtaacaagaatattttataaatgagaaattcaagcatattttctcaaactaataggaggtaatgagcacagtgaactaagataatctcagtttaaacaaacaggattttcactgatgttggacttgaaaacactatccagattaatgactttgttaatacccagtcactgggcataagtccaagtgtagcataaatattcttccagacttgatgacagtgaaatattctatgtttagccctccgaagggataactaagttctcagtgattgatggatggcagccaaataggttcgcttttttagtattgctgtttgttggaatggggtcatgcttgtgaatagatggtgatggtgtgtggttttatgaggaattgtgcaatgttttatccctgtctgccccttcaaaagaagtgtacgaagagaaaaaagaaagctctattaactcagccactactaggactctggaatatctgtggttcccccaggggctcaatttatgtacttgccctatctccatctggggacattgtgaaatggaatttgggatttattgtcaagacctctaattactaatataggcattgacaaggtaggggaagggagttacactcagcacgtactgcaagcctttggaaggcacattaagacacagttgagcctacaatatcttaggattagtccagcactatttaatagtcatataaagcaggcaacatgtgtagttttaaattttctagtagccatgttttaaaatataaaaagaaaattaattgtagtaatctattttatttaactcagtatatccaaaacatcatttcagaacaggcacagtggctcacacctgtaatcccaacagtgtgggaggctaaggcgggtggatcacctgaggttaggagttcaagaccagcctggccaaatgatgaaatcccatctctactaaaaatataaaaaattagccaagtgtggtggcgggcacctgtaatcccagctactcaggaggctgaggcaggagaatcacttgaacccaggaggccgaggttgcagtgagccgagattgccccattgcactccagcctgggcaacaagagcaaaactccgtctaaaaaaaaatcatttcaacatgtgataaacataaaattattaatgagatattttccatttttggtactaagtctttgaaacccagtatgtaccttatgcttacagcacatcttaattcagactggccacatttcaaatagccacacatggctggtgctgccatactggacagtgctggaatccatgggcctaacgacaaacttccacacaacataaaggaattgagaggcagctacaagtggctcacctagcgatgttgctaaattatttttcttcctccagggaaccccagagactaggaagaagttcttccaggaaagccaaatgttgaaattcaaacaacattctaatctagacagtcacgttttgaaatttaaaatttacacttagaaattatttcatccattgtggaagacagtgtggtgattcctcagagacctagaagcagaaataccatttgacccagcaatcccattattggatatataccaaaaggaatataaatcattctgttataaagatacattccagcgtatgttcattgcaacactattcacaataacaaagacatggaatcaacccaaatgcccatcagtgatagactggataagaaaaatgtggtatgtatacaccatggaatactatgcagccataaaaaggaactagatcatgtcctttgcaatggatggagctggaagccattatcctcagcaaactaatgaggaacagaaaaccaaacaccacatgttctcacctataagtggaagctaaatgatgagaacccacagacacatggaggggaaaacacatatgggtcctgtcagtgggggcggggggtagggagagcatcaagaacagctaatggatgctgggcttaatacctagatgatgggttgatctgtgtaacaaaccaccatggcacacgtttacctatgtaacaaacctgcacttcctgcacatgtaccatggaacttaaaagctgaagcaaaaaaacaagaaaatatacaaatagccaacaaacatacaaagcaatgctcggacttattttatgttgaagactggaagtacttttgcatgtcttctgttctccaaaagtttgtgcagtactctggcatgtatttaattgttaacttttttgaaaaaatctatgccttcttttgaaaccacctttttttttttttttttttgagatggagtctcactctgtcgtccaggctggagtgcagtggcgcgatcttagctcactgcaacctctgccccccgccccaccaggttcaagtgattcttgtgtctcagcctcccgagtagctgggattacaggtacccgccaccacgcccgctaatttttgtatttttagtagagacagggtttcaccacgtttgccaagcaggtctcaaactcctgacctcaagttatccacccaactcaatctcccaaagtgttgggattatagccgtgagccaccgcacccagctgaaaccacctcatttaaagcatctgttttcttacagtttctttcacctctttaaattttaaaatcacttattctgttttattttaaatagaacatgtacaaattgtagaatgtttagaaaatacatgtgcaccgccagattaaaatgcctacaccaaaaataaaaaaatataatttccactcaggagcttaaggatggtggtctggtttgaggaggagctgtgtttccactgtaagcacatgagtttcacttaggttatatgtttactagggggggctcgggtgagaggctgatgcggattatgtagaggtgggctaagcccccaagtcatacctgagtgtgccactgtagctcctatagaggcaggaattttgctgaaagtcgcccacccagtactgaggtggtccccacaatactgaaggtgttccctactgaaggtcatggaagctgtgggcaggagcaaacatgtgggaagagctgggaagcagcttccagtatgaagtgctggatctagcaccttgaaagatcatcaccagaacagaggaggcacattggcacctgggtggtttatcagaaagaaacatccggtagctgggcatggtggagcacgccaagtagtctcagctacttgggaggctaagctgtgaggatcgcttgagcccagaggttcgaggtcagtctgggaaacgtagtgggaccttgtctcaaaaatttaaaaaaggaaaaaaaaaaaaagagaaaaacagctagaaatcacgagcagtgttgagacaggacaactaggagggtaaggccactgctgaggaggtcacagggggtcacctgggagccaacctctgacactgaggggaaggcatagactgtgggagaggcatctgtttgttttttctggtgcaaggagaataacaaaatgcgatcagaagggctaatagactgcagatggagctcagcccagctgaaggctttgaactggaaccagccctctaattttcagcagtgcgtgtggcccatgaaaaagaaagagtgaaattaaacaagggatcatcagaggccattatgagttactctcaatgggtgaaacagcagattgtattgagagaaatagtagggatttgacagtgaaagtaatctgatctgtatcctgtcaacaataggggaactattcaaaagttacatgccaaagggtgggatgatgggatgtgcacttcagaaagctcattctttctctccaggggcagtaagaccgggagccggccttagtttggcgagcattccagtgacacaggggagagatggtggcggtctgaagtcagcctggagaagctgggatgcagagatgtagggaggctgaactgcccttgtttttggagagggaagggcaggaagggcacagacaggagtgtaggcccacacctaagtctctaactgggccagctggatgaaagctggtgccgccactgaaacggaaataggatcatggagacatcagaagggaggctgccggcaggcggctgtggatctaaaggtgggtagagatatggaggttatcagcaaataatcagtagcccgtgaggagaccctgttacacgtgcagcacactaagaaagctgattgaattatcaaacatcacttctgataagcaaattctaatatattttatacttaatagaataagtggtgagtgggggaagactataaacagtgtaattggtagtgttttcctagccaaaaggaggcttttaggtttttcttttgtctctgttaggtattccaagttctagaattattgccaacagttttctctggtgtcctgttccactcagggtggaattcctccccacacccgcacatgtgtgtgcacaaccatagcctgatggctgctgatgacctggctcccattcccaatctccctggtgcgaggcccaatttctctgcagttgctctcacctgagaccctgcctgtgccttgcactataaagtggtcctcttgttgctcttcactttggcgtctaggtgctagaaggccaaaagctgtaggagctctggcccctgcacctgtggataacgtcactgctgggtaacagccctatgaccgccataaagaagtttgcgtgggtggggagtggggaggctgcaactggccaggtggccctggggagggagaagcacaatgaaaatggactctgaggcccttggaagagtgctggagaaaaagaaatagagattagagatgagctagggacgcctaaaagagcacgaaggacttgggatgcaggttccttggcagggagtctgtgtggtctcaagcactacctggaataagctcctggcagccccaggatggacgaccaggtaaggtagcagaccctggaggggagcgagagagagcccctcctctctacctttctatcccaaataacaagtgaccctaaagtctcttaaatgactaaacgtagctccctctcggggctggcccccatagcaggaatggtgaggttcaagagaaaccaaatatgctctcacctgttttctgatgactgaacttaatagcaaataaggcctttcatttccatacttagaagactgaaattacaacacaaaggaaaagatttctgaccccaaatgtattcatagtaaaagataagagctgttccaggattgatagaggttagaaaaagggacacttctcctaggttggaaaagagccctgaaatagaagatcaagagcctgaaagaccaatattctcagcattgccattttatcttaggctctgtctacctgaagccaattcagaccaagagaaacagctggaacagtttccagtgtgggcagtgatggtctttgtcacagcataggtcattgaattattttatctgcataagatttcacttggggttttgtgtaggagaagtatttcacaaatctctatgtcatgaaatacttccaagtattaaattacccaaaagatgcttactacccatgggcatgaattcagagggcaaatatgcttacatcaagagggacagacaaaaatgtgaggttttccttaattatattggttccctagttatatataacagacactacatctctgagtccacaaaatcttttccagagtgccaataacttttttcctttgactcaacctcagcccactctgccagcaatgtgggacggccacaatccgaagcctgtttgccaagttatgggggcttggaagtcttttcagctggtagaacagaggtttcccagcccttttgttttatttatttatttatttatttatttatttatttatttatttatttattttgggacagagtctcgctctcgcccaggctggagtgcagtggcgcaatcttggctcactgcgagctccgcttcccgggttcatgccattctcctgcctcagcctcctgagtagctgggactacaggcacctgccaccatgcccggctaattttttgtgtttttagtagagacagggtttcactgtgttagccaggatggtctccatctcctgacctcatgatcctcccgcctcggccccccaaagtgctgggattacaggtgtgagccaccacgcccggcctcccagcccttttaaaatgatctaacatgcatacaacagaggttggaagagtgactcagccactaagtgagtggatactttttaaatccatgataaatatgctggaaagctatctaattgttcctcattaggaacatttcttcctcattaggacattgaagaatgctggaacacaattcactgaatcactcttacatttagatcgcacttttaattcactttaatgcattttcacatttattgtctcctcttattcaatgccagtaaaggagatagggcacacttcatcattctcatttgatagctcagaaagggaaaacaagacacagcaagggtttgcctttgggtgcactgcaaattaggagccgatctagaagttgcagtcagcctctttgggtggtatcttggccctacaacttcatagcttgtgtctaggactaatgagctcacctaaatctcactctgcctgacctgcaggtgaggtctggaggcaaactgtctatttggagtatcagtcatatagttagtgtttctttctctcttccagacacaatgggtgttgataaacgaaatgcaaaccgtccatc

SEQ ID NO: 1118 - DNA, 5712 bp, Homo sapiens
tcccgcttctcctcctcctcctccacagttgcctgccctgggcgggggcgagcgcgtccggtttgctggaagcgttcggaaatggcaacttgcgcggtggaggtgttcgggctcctggaggacgaggaaaattcacgaattgtgagagtaagagttatagccggaataggccttgccaagaaggatatattgggagctagtgatccttacgtgagagtgacgttatatgacccaatgaatggagttcttacaagtgtgcaaacaaaaaccattaaaaagagtttgaatccaaagtggaatgaagaaatattattcagagttcatcctcagcagcaccggcttctttttgaagtgtttgacgaaaaccgattgacaagagatgatttcctaggtcaagtggatgttccactttatccattaccggttgaaaatccaagattggagagaccatatacatttaaggattttgttcttcatccaagaagtcacaaatcaagagttaaaggttatctgagactaaaaatgacttatttacctaaaaccagtggctcagaagatgataatgcagaacaggctgaggaattagagcctggctgggttgttttggaccaaccagatgctgcttgccatttgcagcaacaacaagaaccttctcctctacctccagggtgggaagagaggcaggatatccttggaaggacctattatgtaaaccatgaatctagaagaacacagtggaaaagaccaacccctcaggacaacctaacagatgctgagaatggcaacattcaactgcaagcacaacgtgcatttaccaccaggcggcagatatccgaggaaacagaaagtgttgacaaccaagagtcttccgagaactgggaaattataagagaagatgaagccaccatgtatagcagccaggccttcccatcacctccaccgtcaagtaacttggatgttccaactcatcttgcagaagaattgaatgccagactcaccatttttggaaattcagccgtgagccagccagcatcgagctcaaatcattccagcagaagaggcagcttacaagcctatacttttgaggaacaacctacacttcctgtgcttttgcctacttcatctggattaccaccaggttgggaagaaaaacaagatgaaagaggaagatcatattatgtagatcacaattccagaacgactacttggacaaagcccactgtacaggccacagtggagaccagtcagctgacctcaagccagagttctgcaggccctcaatcacaagcctccaccagtgattcaggccagcaggtgacccagccatctgaaattgagcaaggattccttcctaaaggctgggaagtccggcatgcaccaaatgggaggcctttctttattgaccacaacactaaaaccaccacctgggaagatccaagattgaaaattccagcccatctgagaggaaagacatcacttgatacttccaatgatctagggcctttacctccaggatgggaagagagaactcacacagatggaagaatcttctacataaatcacaatataaaaagaacacaatgggaagatcctcggttggagaatgtagcaataactggaccagcagtgccctactccagggattacaaaagaaagtatgagttcttccgaagaaagttgaagaagcagaatgacattccaaacaaatttgaaatgaaacttcgccgagcaactgttcttgaagactcttaccggagaattatgggtgtcaagagagcagacttcctgaaggctcgactgtggattgagtttgatggtgaaaagggattggattatggaggagttgccagagaatggttcttcctgatctcaaaggaaatgtttaacccttattatgggttgtttgaatattctgctacggacaattataccctacagataaatccaaactctggattgtgtaacgaagatcacctctcttacttcaagtttattggtcgggtagctggaatggcagtttatcatggcaaactgttggatggttttttcatccgcccattttacaagatgatgcttcacaaaccaataacccttcatgatatggaatctgtggatagtgaatattacaattccctaagatggattcttgaaaatgacccaacagaattggacctcaggtttatcatagatgaagaactttttggacagacacatcaacatgagctgaaaaatggtggatcagaaatagttgtcaccaataagaacaaaaaggaatatatttatcttgtaatacaatggcgatttgtaaaccgaatccagaagcaaatggctgcttttaaagagggattctttgaactaataccacaggatctcatcaaaatttttgatgaaaatgaactagagcttcttatgtgtggactgggagatgttgatgtgaatgactggagggaacatacaaagtataaaaatggctacagtgcaaatcatcaggttatacagtggttttggaaggctgttttaatgatggattcagaaaaaagaataagattacttcagtttgtcactggcacatctcgggtgcctatgaatggatttgctgaactatacggttcaaatggaccacagtcatttacagttgaacagtggggtactcctgaaaagctgccaagagctcatacctgttttaatcgcctggacttgccaccttatgaatcatttgaagaattatgggataaacttcagatggcaattgaaaacacccagggctttgatggagttgattagattacaaataacaatctgtagtgtttttactgccatagttttataaccaaaatcttgacttaaaattttccggggaactactaaaatgtggccactgagtcttcccagatcttgaagaaaatcatataaaaagcatttgaagaaatagtacgacaacttatttttaatcacttttaaataatgtgttgcatttacacagttgtttcattctgtctttagagttaggtgcctgcctaaagccaggcaccaccacacctggctttagagttcacacaataggatataagtcctgtatgacttaaatagtgaattttgtccttaacatttacctcttgtatagtatctgccaggcagttttttcttaaactactgagatgataactgtgaaatatttgtgatacgtgtcatgtgtgaaaagtttgatgcattttgagatggaaaactgaaatttggaaaaagaaatactttactattgagtaaactacaatatatttagtgctactcgcagctatttattattttgtagacctgccttatgcaccttactgcctagatttttgggaaaaaactttggaaagtgtgttacctatatttctagccaactaactcacagaaaaactgtttacttcttcactttcgaagtatttggcttttgttaatatgcagttttactaaacagatggttcataagacatgtgaagcaaattcatatttgcaatgggtaaaaagtattaaagcctgtctcttgcctgcatatcctattgaccattggtatagtcatcactttttcatattttagtgtagttagaagaattccttcttcaaacattaaagatccacaaagcagtatttctaaatatgccttgaagaactaaatgaagtgtatagcacttgcctttactagatattctttacacttgtacaattatgtagtaaatgtatgtttacagggtttatcatgtttacagattaagctaatttctgtagtcgcatttttatatttttagtatcactctagtaaaaaaaccaaataatttgtttaaaataaccaaagagttgttataatgcataatttgtattaaatttattactatttcttatgccttttaaaatactgtttactatgaagacaatgtttttaattacaaatccagaattctgtaggcaaaatgctacagttcatatcttcctttaaccaaactgaagtacataaagaccatgtacatgtattcatcaaacgtttattgaatgctgcgtgcctagcgctgtgctatgctctggggtaagagttgtcagcttcagagaagctgagtcctgatcctcaaggaacttgcaaatgtgtctatgaatttgtaaaacaatcaaaagtaggcataagcagaataaggcaaaagggaaagtgttctaggttccagcacacctgcaaagataaagtgtgccaagactgtatttatatttcatacttatattgtttcatccttatattggaatgattatatagaaaatgctcttaaaaagattaaacctatttctcagtatggtatcttggtgatttaggaataattgtaaatatatgttacgaatcttcttaaatatatatatatacacaccctgtgagaactgtaaaaagtacctctggttcttggtttaagtttgttggggtataacatgatgagtactcattagcacctgatagaaatctgaaatgtgacagggaagcaattcacagattaatgtaccctgcgttttgtcttcaccattgtcaaccagcagtcaaggatgagcaccaggtatagtcctggtttgatatctcaccagccatgtgaactgaagcagcttacttaacctctctggattcatatttcttcatctgtcaaatgagagtaatcatgcccaccctcattgtcatgccagattgtcagaagttccagacagatgagaaagcaaaaagtactttgtaaagtgttatacaatcagaaggtgctttgtgctgaccgtcagattgtgtcaagtcaggtgtgcaaattgaccacactcccaaagaatcatttaaaagtaaagtgacttctaagagacaaggaagtaggaacatttctgatattaaatatataaataatatggatacacatgtgtatatctgtatatggatcttaccatcataattcattttcttcatatcagcaaagtaatagtaatgtgggccaatgcattttggaaatgtcctcattatgtagaatggaatgtgaaaattatttttgttaaaacaggattttgccacaattatttaaatattatgtttgtgaactatctaagcatgagaaaatacaaagctttctttgtatctggctgatactcatttggatgattctgtgactcatagaacatgatgttaaatgagaccagactcaactgccaccagtccccagctgcagaccttcatccccttcatctcccactaggggctcgtggtctggaagaaacatgtatcaagcaacacagccccttatcccagatagaaaagtgtctcaaatgcattctactgcgggacagtcagtaggatcattttcataaagcaaggacatcatatgtttctagaaattacaagcatataactttagcctacaatctcttattaaaaatttttaacaaaattgtattacaaatgcatttcatcagaactcaaatttaaatggtgtttgttttgggtttttatttataatgctgaagttattccatataagtatcaagttaaacacaattcattttgattataaactatttgactttttaaaatcttctgacacagtaaatatatatatcaagattgatgtatcaaaatttattgcacactttaaagtgtaaaatcattttttaaaatcttgaatccacaaataaagttctattctgattttaaaaaacaaaacaaaa

SEQ ID NO: 1119 - protein, 898 aa, Homo sapiens
MATCAVEVFGLLEDEENSRIVRVRVIAGIGLAKKDILGASDPYVRVTLYDPMNGVLTSVQTKTIKKSLNPKWNEEILFRVHPQQHRLLFEVFDENRLTRDDFLGQVDVPLYPLPVENPRLERPYTFKDFVLHPRSHKSRVKGYLRLKMTYLPKTSGSEDDNAEQAEELEPGWVVLDQPDAACHLQQQQEPSPLPPGWEERQDILGRTYYVNHESRRTQWKRPTPQDNLTDAENGNIQLQAQRAFTTRRQISEETESVDNQESSENWEIIREDEATMYSSQAFPSPPPSSNLDVPTHLAEELNARLTIFGNSAVSQPASSSNHSSRRGSLQAYTFEEQPTLPVLLPTSSGLPPGWEEKQDERGRSYYVDHNSRTTTWTKPTVQATVETSQLTSSQSSAGPQSQASTSDSGQQVTQPSEIEQGFLPKGWEVRHAPNGRPFFIDHNTKTTTWEDPRLKIPAHLRGKTSLDTSNDLGPLPPGWEERTHTDGRIFYINHNIKRTQWEDPRLENVAITGPAVPYSRDYKRKYEFFRRKLKKQNDIPNKFEMKLRRATVLEDSYRRIMGVKRADFLKARLWIEFDGEKGLDYGGVAREWFFLISKEMFNPYYGLFEYSATDNYTLQINPNSGLCNEDHLSYFKFIGRVAGMAVYHGKLLDGFFIRPFYKMMLHKPITLHDMESVDSEYYNSLRWINDPTELDLRFIIDEELFGQTHQHELKNGGSEIVVTNKNKKEYIYLVIQWRFVNRIQKQMAAFKEGFFELIPQDLIKIFDENELELLMCGLGDVDVNDWREHTKYKNGYSANHQVIQWFWKAVLMMDSEKRIRLLQFVTGTSRVPMNGFAELYGSNGPQSFTVEQWGTPEKLPRAHTCFNRLDLPPYESFEELWDKLQMAIENTQGFDGVD

SEQ ID NO: 1120 - DNA, 5452 bp, Homo sapiens
tcccgcttctcctcctcctcctccacagttgcctgccctgggcgggggcgagcgcgtccggtttgctggaagcgttcggaaatggcaacttgcgcggtggaggtgttcgggctcctggaggacgaggaaaattcacgaattgtgagagtaagagttatagccggaataggccttgccaagaaggatatattgggagctagtgatccttacgtgagagtgacgttatatgacccaatgaatggagttcttacaagtgtgcaaacaaaaaccattaaaaagagtttgaatccaaagtggaatgaagaaatattattcagagttcatcctcagcagcaccggcttctttttgaagtgtttgacgaaaaccgattgacaagagatgatttcctaggtcaagtggatgttccactttatccattaccggttgaaaatccaagattggagagaccatatacatttaaggattttgttcttcatccaagaagtcacaaatcaagagttaaaggttatctgagactaaaaatgacttatttacctaaaaccagtggctcagaagatgataatgcagaacaggctgaggaattagagcctggctgggttgttttggaccaaccagatgctgcttgccatttgcagcaacaacaagaaccttctcctctacctccagggtgggaagagaggcaggatatccttggaaggacctattatgtaaaccatgaatctagaagaacacagtggaaaagaccaacccctcaggacaacctaacagatgctgagaatggcaacattcaactgcaagcacaacgtgcatttaccaccaggcggcagatatccgaggaaacagaaagtgttgacaaccaagagtcttccgagaactgggaaattataagagaagatgaagccaccatgtatagcagccaggccttcccatcacctccaccgtcaagtaacttggatgttccaactcatcttgcagaagaattgaatgccagactcaccatttttggaaattcagccgtgagccagccagcatcgagctcaaatcattccagcagaagaggcagcttacaagcctatacttttgaggaacaacctacacttcctgtgcttttgcctacttcatctggattaccaccaggttgggaagaaaaacaagatgaaagaggaagatcatattatgtagatcacaattccagaacgactacttggacaaagcccactgtacaggccacagtggagaccagtcagctgacctcaagccagagttctgcaggccctcaatcacaagcctccaccagtgattcaggccagcaggtgacccagccatctgaaattgagcaaggattccttcctaaaggctgggaagtccggcatgcaccaaatgggaggcctttctttattgaccacaacactaaaaccaccacctgggaagatccaagattgaaaattccagcccatctgagaggaaagacatcacttgatacttccaatgatctagggcctttacctccaggatgggaagagagaactcacacagatggaagaatcttctacataaatcacaatataaaaagaacacaatgggaagatcctcggttggagaatgtagcaataactggaccagcagtgccctactccagggattacaaaagaaagtatgagttcttccgaagaaagttgaagaagcagaatgacattccaaacaaatttgaaatgaaacttcgccgagcaactgttcttgaagactcttaccggagaattatgggtgtcaagagagcagacttcctgaaggctcgactgtggattgagtttgatggtgaaaagggattggattatggaggagttgccagagaatggttcttcctgatctcaaaggaaatgtttaacccttattatgggttgtttgaatattctgctacggacaattataccctacagataaatccaaactctggattgtgtaacgaagatcacctctcttacttcaagtttattggtcgggtagctggaatggcagtttatcatggcaaactgttggatggttttttcatccgcccattttacaagatgatgcttcacaaaccaataacccttcatgatatggaatctgtggatagtgaatattacaattccctaagatggattcttgaaaatgacccaacagaattggacctcaggtttatcatagatgaagaactttttggacagacacatcaacatgagctgaaaaatggtggatcagaaatagttgtcaccaataagaacaaaaaggaatatatttatcttgtaatacaatggcgatttgtaaaccgaatccagaagcaaatggctgcttttaaagagggattctttgaactaataccacaggatctcatcaaaatttttgatgaaaatgaactagagcttcttatgtgtggactgggagatgttgatgtgaatgactggagggaacatacaaagtataaaaatggctacagtgcaaatcatcaggttatacagtggttttggaaggctgttttaatgatggattcagaaaaaagaataagattacttcagtttgtcactggcacatctcgggtgcctatgaatggatttgctgaactatacggttcaaatggaccacagtcatttacagttgaacagtggggtactcctgaaaagctgccaagagctcatacctgttttaatcgcctggacttgccaccttatgaatcatttgaagaattatgggataaacttcagatggcaattgaaaacacccagggctttgatggagttgattagattacaaataacaatctgtagtgtttttactgccatagttttataaccaaaatcttgacttaaaattttccggggaactactaaaatgtggccactgagtcttcccagatcttgaagaaaatcatataaaaagcatttgaagaaatagtacgacaacttatttttaatcacttttaaataatgtgttgcatttacacagttgtttcattctgtctttagagttaggtgcctgcctaaagccaggcaccaccacacctggctttagagttcacacaataggatataagtcctgtatgacttaaatagtgaattttgtccttaacatttacctcttgtatagtatctgccaggcagttttttcttaaactactgagatgataactgtgaaatatttgtgatacgtgtcatgtgtgaaaagtttgatgcattttgagatggaaaactgaaatttggaaaaagaaatactttactattgagtaaactacaatatatttagtgctactcgcagctatttattattttgtagacctgccttatgcaccttactgcctagatttttgggaaaaaactttggaaagtgtgttacctatatttctagccaactaactcacagaaaaactgtttacttcttcactttcgaagtatttggcttttgttaatatgcagttttactaaacagatggttcataagacatgtgaagcaaattcatatttgcaatgggtaaaaagtattaaagcctgtctcttgcctgcatatcctattgaccattggtatagtcatcactttttcatattttagtgtagttagaagaattccttcttcaaacattaaagatccacaaagcagtatttctaaatatgccttgaagaactaaatgaagtgtatagcacttgcctttactagatattctttacacttgtacaattatgtagtaaatgtatgtttacagggtttatcatgtttacagattaagctaatttctgtagtcgcatttttatatttttagtatcactctagtaaaaaaaccaaataatttgtttaaaataaccaaagagttgttataatgcataatttgtattaaatttattactatttcttatgccttttaaaatactgtttactatgaagacaatgtttttaattacaaatccagaattctgtaggcaaaatgctacagttcatatcttcctttaaccaaactgaagtacataaagaccatgtacatgtattcatcaaacgtttattgaatgctgcgtgcctagcgctgtgctatgctctggggtaagagttgtcagcttcagagaagctgagtcctgatcctcaaggaacttgcaaatgtgtctatgaatttgtaaaacaatcaaaagtaggcataagcagaataaggcaaaagggaaagtgttctaggttccagcacacctgcaaagataaagtgtgccaagactgtatttatatttcatacttatattgtttcatccttatattggaatgattatatagaaaatgctcttaaaaagattaaacctatttctcagtatggtatcttggtgatttaggaataattgtaaatatatgttacgaatcttcttaaatatatatatatacacaccctgtgagaactgtaaaaagtacctctggttcttggtttaagtttgttggggtataacatgatgagtactcattagcacctgatagaaatctgaaatgtgacagtagcaaaaccactttctactttccaaacaccacagcatcagcatggtttaggggaagcaattcacagattaatgtaccctgcgttttgtcttcaccattgtcaaccagcagtcaaggatgagcaccaggtatagtcctggtttgatatctcaccagccatgtgaactgaagcagcttacttaacctctctggattcatatttcttcatctgtcaaatgagagtaatcatgcccaccctcattgtcatgccagattgtcagaagttccagacagatgagaaagcaaaaagtactttgtaaagtgttatacaatcagaaggtgctttgtgctgaccgtcagattgtgtcaagtcaggtgtgcaaattgaccacactcccaaagaatcatttaaaagtaaagtgacttctaagagacaaggaagtaggaacatttctgatattaaatatataaataatatggatacacatgtgtatatctgtatatggatcttaccatcataattcattttcttcatatcagcaaagtaatagtaatgtgggccaatgcattttggaaatgtcctcattatgtagaatggaatgtgaaaattatttttgttaaaacaggattttgccacaattatttaaatattatgtttgtgaactatctaagcatgagaaaatacaaagctttctttgtatctggctgatactcatttggatgattctgtgactcatagaacatgatgttaaatgagaccagactcaactgccaccagtccccagctgcagaccttcatccccttcatctcccactaggggctcgtggtctggaagaaacatgtatcaagcaacacagccccttatcccagatagaaaagtgtctcaaatgcattctactgcgggacagtcagtaggatcattttcataaagcaaggacatcatatgtttctagaaattacaagcatataacttt

SEQ ID NO: 1121 - protein, 898 aa, Homo sapiens; identical to SEQ ID NO: 1119

SEQ ID NO: 1122 - DNA, 44033 bp, Mus musculus
  misc_feature (1)...(44033): n = A,T,C or G
accctatcctcaaattagaatttcatacagacatggtaacacacacctgtagtcctagcataaaacagacactcagaagttcaagggcatcctcagctacgcagagttccagcctagcctgacatgcatgagatccaattagacaagaaataaagaaggaagggagggagggaggnnnnnnnnnnnnnnnnnnnngaggaaagaaggaaggaaggaaggaaggaaggagagagagagaaaagaagaaggaggaggaggaggaggaagaaggaagaggaggagaaaaaagagaaagaaagaaaaaagaaaaagaaagaaagagagaaagagaaagagagagagaaagaaagaaagaaagaagagagaaggggaggggagagggaaaaggagagagagaagaaaagggggggggagaaaattcccatcccttttagacaaggcactcaattttaattgacaataaataaaatgtgttaatggaccccaaatcatacaagagaaatgatgagctgagcccccacactggaaggccctagctagctaaatgttcactattccagtccctcaccccaggacatcaggttcactaaaagcttttatcgccagagtctgctctcaggctaatcagcttaggggaagccagatcatcaactcaaatttcctcatccccaagtggagaaacaaacacagtccaagcaaatctcagggggcacagaaagggagcgcttttgaagggaagcgctacttcctcaggagccaatcattttcttaacaggggcaagagagctttcttcttaggggggctcaggctttaagctgcaagcgttgttctgtccttcagaagcatcaaacttactctattttatttgggaaatatgttttatgtgtgtgtataactactgcatatatatgttaaaataattctttcctatttcatagtgaatctatagataagacacatgccaggaaaagtcttaataacaaaagaagaaggtaaactcaattgaaaaaaaaaatcccatatataggctggagaaatggctaaatggttaagaaagattcttcctaaagggaacccaagttcagttcccagcactcaggggtgtgtgtgtgtgtgtgtgtgtgtgtgtgtgtgtacaaaggaggaggaaggaagggagggaggaaggaaaagagagagataaagagagtaaccataaaattagttatcatactttataggccaaattagttcagttctcactgggaagcctcccaactcctcattgggtgggaagccccattcagtagtgtaaagtggtctataaagacgcctgctaagaaagtccagacttaactgttgcttctcaacctttctgtctcaacagatcaaatgatctttcacaggggttgcctaagacaactggaaaacacagtatcaagattacttataatgtagcaatgaaaataattttatggttggggtctccacaacatgaggaatggtatcgaaggctggaagcattaggaggttgagaactgctggactagatagatggtcctggagttttatccagtaactcgagtgcacattcagccacagtcttacacttggttttgcctctgactccttacaaaataagattcaaaatgagtcagagtgacactctgtctccaggcagacagggtctaatcaaggatgggctggaggcaggggtggctcagtgaatgagagagcacttgcctagcatctgccaggccctgagttcaagccccaagaatgaaagggtgtagtcatggaaatgggccaagtcacagaaaaacagctgacaactgaaagtagttacacaattaagtgccaacagttggccatttctgttagaagccacagaaaggttcattcattatagtgcaaaatattcatgaagaaattaatgtccatttccttcgatttccaagaactccactcttgctctagactaatgtaagaggccagaagataggtcagctactaaacagccctgcctaattttctcagggccagggcagagggctgcctgctgccaccatcacaagacaggtgcaggagtgtggaaggagccattactactcagccggccataagtttgttctgcatgctggcctggacttccaaggtagcagagaataacttctgatcctcctgcctccgtgcccaaagagggtatcagggccactgggactggagttatgggtggttgtgagctgccctgtgggtcctgggaatcgagccttgtcctctgaatgctcctaagtgctgagccatctctccagccccttaataataacaacttaataaccctgattgcagcggacacaatagtgaatgagcctgacccctggccctcacagtgggctgtgctgatcgcagcacgaaggggaagaggacaggtagagaggggacaggcaggacaaagtgggatctctatttcaaaaaaagaacaagattaaaagtgctttaagaggcctcagcaggaacacagctagagaaggtagtcgggatgggtgccaacagtagagaaatggttattagagcagatgtgaccgtggccaggtatagggcacacctgtaatcccattcaggaggctgaggcctaggctacactctgggttccaagctatcctgggatacataacggagccatgtttcaactaccacacacacacacacacacacacacaccccaaaaaactaagtagacaagatagctcagtagttaccaccaagccacacaacctgagttaaatccctggatccacaaggtggaaggaaagagctgactcctatagacagtcctctgaccttccatacatatgacaccatacacaaatgatcaatacatgtttatgagtattttgcctacacgtacgtacatgcagcacatgtgtgcagtgctttcagtggccagagaagggaatccagtcccctggaactgaaattactcagtgttagtgagctgccatgtgggtgctgggaactaaacccaggtcctctgcaaaggcagcaaataattcctagtcaccagagcattcagtgaacgtcaattttacagtttgttttttttattacgtattttcctcaattacatttccaatgctatcccaaaagtcccccacactctcccccgccccccccactcccctacccacccattcccattttttggccctggcattcccctgtactggggcatataaagtttgcctgtccaatgggcatctctttccagtgatggccgactaggcaatcttttgataccagtttgtttatttttaagtgtgtgtgtgtgtgtgtgtgtttggttttgtgcaatgagtgcaatactggcagagtccagaagacagcactgggttctctgaagttggagttacaggcagctgtgagttgcctgttgtgggtgctgggaaccgaacttggatcctcaggaagagcaagcagtctgtgctctaaatgacagagccatttctccagccacttaccaagtttttaaaccaaaaaatatttagttctactcaagttagactcaataaaatgtgttcagggtggacaagagacatggaagaatgaagagaattgtttggcctgagattctctaagagtggaatttctttactaagatggggaaacaggtatcaggaaaggaagttaaaagtctggttcccaaaggcggcttccctcttcaaaatgcctgtgcgtgctctaaagccaaggccacagaattgagaagctgaccgtaaattccacacagagatacaagggactcttctgcacagccaaaaaaactcgtaaaaggtggcaagggagggggtggggcggggtgacgtcagaaataaacaaacaacaacaacaacaacgacaaataagacacactgtggagaggaaacggaaaggtgttggggtgggggggaagaccaaggtaaaataagaaggcagctcccattcaggcgcgcttagcatttctgaatacccccccttcctttctttttggtgtttgttttttgagaaagagtctcctgtaacccaggctggtttcaagcacacactatgtagcaaaggctgaccttgaaccctggatccttctctgtccaccttccaaatgcagggattacttttcccataccggttccactctacagggagctttaaagaatacgaaatgtctcctgccttcctcacccggctgggctgaacagctaaggcagaacagctgttagcccttgggcttgaaagagaagcctaggggaatactccagacaacagcaagatgcaaaggccaggggggctgctgagacgcctcaagatctcctacattacagagctggctttccaaatcggtacccagctactgggccagagacccggtcttggcaaagtgaccaaaatatgtcatccatcaattctacctccgatagggtgactctaagaccaggctgaccagctgggttctctgaatgacaggaaaaggcagagccctttctcacctgaaagcagcaggactctaaagactttaaagtcaaagacttctaaaaccgaagtgagggaaggacagagggatgggcagacctatttctcttcccctcattaaagggattttggcacctagatgccacccgggataaccttcagcccctggaactccagaaaaccagcatccattccgaagatctgtcccctggttgccctagggctgacttgctcgcctgcaatctgcagcgcgcccagaacgctgagtgctcacccggtttggtgctctgtccggtgctgtccctgcggtgttgcgtccctgcagtgctagattcccaacgtgccgcgtcctcgctgtgctctatcccttaggtactcccttccaaatggagctcgggaccccgtgcgactggccttttttgggtgcttggcgctattttccgtctggccccacatcacttcccgtagaggagagcgcggtgggggcgggtcctgagcggcctccacctccgcctcctgtcacctgcccgcaggcccccagccacagaaacgactgctcgcctcgcctggcacggatcgggtctcctcgccccttctgaaaggtgtgagaaccacagagggtggttttccttgagaccaagagagccattcacaaaaagctcaaattgccccaggatccgggtaaggcgaggcgtgccctggagactccaaaggtctgtcctaaaagctttttcatggctgtgcatcctccctggagacagcttgggcatggcctactggggttcctggactcgatgatgagaaaaataggtaagattcagtcagaagaaaataaacactattctggaaggcaatggccagcggagtctacatgcacacagtctaactcggattacactcaccctgaagtcctaaaacactgttagggcaggcagttactgcacagtaagagggaaattatggggtggcataacatgctaagacccggcagggtccggagcagcctatgaccctctgctgcctcctagtggccttctaccgatgcctagggttttctgtgagcagtctgggtctcaacctggggatggaggacattagccaaatccgtccaaaggtggttctgcgcttcacactggcctttgggcctgccctgttgctttcagaattccacttccaagacaagcaaaatgctgagaaggaagactgggctaagttctgtccatgcagtttcattcatccctagggcctgccaccacaaactccgcggtccagctgtcccacccacctgcacacccagtcacccctcctgtctgtagctactaggactgcaccacagtgcagtttctcaatctgtagatggcagctactggagtcacccacgcttgtaagcaaccccaataaactggaccggtacagaatcttttctatcattccatcagggctgaagagaaataccctccccaggaaaagcaaggcaaccatcttccttcaggcactagctcttttttttttnnnnnnnnnnnnnnnnnnnnnnnnnnnnnnnnnnnnnnnnnnnnnnnnnnnnnnnnnnnnnnnnnnnnnnnnnnnnnnnnnnnnnnnnnnnnnnnnnnnnnnnnnnnnnnnnnnnnnnnnnnnnnnnnnnnnnnnnnnnnnnnnnnnnnnnnnnnnnnnnnnnnnnnnnnnnnnnnnnnnnnnnnnnnnnnnnnnnnnnnnnnnnnnnnnnnnnnnnnnnnnnnnnnnnnnnnnnnnnnnnnnnnnnnnnnnnnnnnnnnnnnnnnnnnnnnnnnnnnnnnnnnnnnnnnnnnnnnnnnnnnnnnnnnnnnnnnnnnnnnnnnnnnnnnnnnnnnnnnnnnnnnnnnnnnnnnnnnnnnnnnnnnnnnnnnnnnnnnnnnnnnnnnnnnnnnnnnnnnnnnnnnnnnnnnnnnnnnnnnnnnnnnnnnnnnnnnnnnnnnnnnnnnnnnnnnnnnnnnnnnnnnnnnnnnnnnnnnnnnnnnnnnnnnnnnnnnnnnnnnnnnnnnnnnnnnnnnnnnnnnnnnnnnnnnnnnnnnnnnnnnnnnnnnnnnnnnnnnnnnnnnnnnnnnnnnnnnnnnnnnnnnnnnnnnnnnnnnnnnnnnnnnnnnnnnnnnnnnnnnnnnnnnnnnnnnnnnnnnnnnnnnnnnnnnnnnnnnnnnnnnnnnnnnnnnnnnnnnnnnnnnnnnnnnnnnnnnnnnnnnnnnnnnnnnnnnnnnnnnnnnnnnnnnnnnnnnnnnnnnnnnnnnnnnnnnnnnnnnnnnnnnnnnnnnnnnnnnnnnnnnnnnnnnnnnnnnnnnnnnnnnnnnnnnnnnnnnnnnnnnnnnnnnnnnnnnnnnnnnnnnnnnnnnnnnnnnnnnnnnnnnnnnnnnnnnnnnnnnnctgagccatctctccagcccaagaactacctttataaataacttagattcattacccatgatttatttatttaaagcatacctaaagtcttactagactaatagtcggtgtgatttcaatagaacgttaagcaaggtttacaatttcagtttatgcagaattagctcccttttcttctgattcttccaacaacttcaccttttcttttaattccttctgatctctggaatattgttcaaatattggctgataaatatacattcctccagcaattccaaggatggcagcaaaaagcagttgtggaagtggcaatctcccgagcattgcagcggcaggtagcgcacaagctgagggtggctatgctccccgggcagcaaaccgcttcagagctgtttctaaggaaaagggacaaaaaaaaaaaaaaaaaaaaaaaaaaaggaccacttagtacagcagacttttagaaacaattttattttgtgctatgtgtgcgactgagtgcaggagtctggaagccagaaagttacaggcagctgtcatctaacacaggtgctgggaactgaactcaggtcctccggaacagcagctcactcttcactccagccccatctgctctttagaagacttgttactactttcctctggcatgaatgttttgtaatatttaaaaatcactaactagggctggagagatggctcagcggttaagagcactgactgctcttccagaggtcctgagttcaattcccagcaaccacatggtggctcacaaccatccgtcatgggatctgacgcccacttctggtgagtctgaagtcaactacggtgtacttatgtataataaataaatctttgggactgagcaagcagaggtcctaaaaaaattcaattcccaacaaccacatgaaggctcacaaccatctgtacagctacagtgtacccatgtacataaaataaatctttaaaaaaaccaagaatcactaactaataaatacataagggtagcatgacagcacataggcttactatgggatattttctaaaatctcaattaggttgtcagtagttaaaaatcatattttatattaaaattgttatttcttccaggcatcgtagcacatgctcatattcccaacagttgggtccaggcaagaggatcaggaactcaaggttaccctctggctgcactgccagttggcggccagtctggattccataacaggttctcggagaacaagtcaataaaaaccttaaaaaggaacctatagggaatgcaagtttgagggtggtgtgagacagagatgcatcctcttctatcaggggatgttcccagggagttattttgtgtgtatttgcctgtgagttattttgtgtgtatttgcctgtgagttattttgcatttgagtgtttgttctggttctttatgataggcaggctgctctagattacaattctgccttcaccaccccagtgttaggatgacaggtgtgcgccactaacatggctgctggaagtcttctcagagcgtttaaactggtaattttcaaaatggcaaaaggaggggaagggatggctgacggctttcaagtcgtttaatactttttctccaagaggtgcccgaaaggactcagaagtgagtgtctctgtttaagcttcctctaaaggatgatagagagaggggacaagtgacctcactatgccttctgcagtagctgtaactcttttaagcaagctgtatgacaaaagcgatttttaagaggctgtaaaacttcactgagccaggtgtggtggtgcaggattttaattccagcaccaggtgtgggcagagactatgtgagtctgaggcctgtctggtctaaagagctgagttccaagccagccaaggctacatagtaagagcctatctcaaaaaaagcaaaagcaaattatgttgagttcttttgatattttaggagaaatcaaacgcaaatcatttgcatgccttctttgagaaaaatggggtgggggtgtagaagattttgcttctcgatccaacaactgaaaacagtagaaagtgacaaatgaacaacacagcactttccgtgtcaaccccctcagcatctgggtcagaggctgtgaatgaagagagcacagggaaggagccacacactttctggactccgatatggatccttaatccaagcctcaggtcacaaaaataatcagcaactccttcctgtactgtaaggagcttgccctaaatagttctcaggcataatttaagctcgccgaggaaagaaaagcatgtcttctcctggattatacagttgaccacacaaaagacaatttatgtgtatgggtgttcgtcttcatgtatgtatctgcaatagcacgcatgcctggtaccctcggagacaccaggctagtatatgggtattctgcaagtgcagtcagtgtttttaagccctgaaccagttctccagcccccaccaactaattttttaaatgccttgattgctggtcatgatggcccatgcttttgatcccaacatccataagacagaggcaggagtttgaggccagtctggtctacacagcaagttccaggccagccacggttatataagactgtggccctgtcacaaagataagaggagacagagtgtggtggcttaggcattaaatcccagcactcatgaggcagagacggtaattctcccgagttcaaggccagtctgatctacatagtgagatcgactccagaaaataaaaagttgattagaaaatagataattagggatagagaaatccattggggtggtaaaaaattgataataaaaattcattgagttataactttttcctattattgtaagaaccgtgatgaaacttcccacgcgaggacgtggcgtgagggatgagcaccgcggtcacccgggagctggtcctcagcgatgcactgcctccctctgctctgttacctccgagcgcctcctcggcgggcgctgtgcgaggtgtgtcaggcggagtaaagaatccagaatctttatttttgtcttttccagcattgaacactggtcagggaggtttgctcctgacccacccggagactcatccgcttccggcagcacttcctgccgcggtagtgccggagcagcgaagggacggcggctcgcggggcccaatcttagtggcatgtgtccgcctacaagaaagtgaggggcgggcaccgtgggctgcaggtagccggggaggatggagtcccaggccgccgactataacccggcctcccgcaatctccacggcagctcgggagaaatgaagctgcggaggaggaagtccaggcagtacgtgagcgcgcaggagaaacgctctccgcgccgtggtgagtgccgggctcacggcagagctcggggcacctgggactacacagcgtggtggcaatgagctcaggctcgctgaacacagtctcttcgctgtgttgtgctgactgtgcttagacgtgtctcaatcctcctgcatcagtctccccagtgctgtgtggtgatgtcacatcatcacacctggcatacagattttcacataaaatctttccctacctccaagcaccaccactgttggtaactaaagcgaaaatacaggctgcctgcacactgggaaaagcaaactttggaaacagccgaccgactacctagtcagtaacagtatttttgtgttgggcaaagcagtttctgaaccttagcatcctcacaagtaaaacaggttcagactcaccagtggttaacaaattgtgtgtgtgtgtgcgttgtgtgttctttagtggggtttgtatctattttttgcggtggggggaggtgttcgtgggttgttttctattccctacagattgctagggaatagaaaacactccatggcctcagcaagctagacaagagttccacccctgagctagtgcctcagctagctcagtggagtgctgtggaaggtgttaacagagagggagccagtgcaccgggcatgtggcattggggggtggggggaactcgctcacttttatgccacacttactgctttgatttgctttccaggtcttcttggagaaaacacttacctggtcttgtttaccatcgctctgcgaatacttaactgcttcttagtgcagacaagctttgttcctgatgaatactggcagtccctcgaagttgcacaccgcatggttttcagatatcctttatggtttcttttccactctgagtgtgtcttcatcttaggagctcagttcatgattatatcttttcagtaattctttgaataatttcagctcaaccaagtatgctgttgttgtgtgctgatagttaccgtatgtctccctttgacacagacttgacagagaagaaaaacacacacacacacacaaagaaaatataggcatggtatcacatgactttttaatcccacccagtatttaggaggcagaagcaggtggatttctgagtttgaggccagcctgatctacagagctagttctaggacagccagggctatacagagaaaccctgtctcggaaaacaaacaaaaatcaacaaacaaacaaaacaccaacaacaaaagaacaccaacaaatgacttgacgctgcctttgaattagtatatacacctaaatgatttgtagcccccggatatagagaaagtaaaaagcacaatccgtcccagcgtttgggaggctgaagcagcaggatcggaagttcaaggatagcctggactagctctgtttcaaaacaaagcccggtcattgggatggctccgctagtaacagcctgcgaacacggccaccataatcctgtccctgagactcacacaagggtggatagagaggctggcattgctcagtggttagaactactcttaactgctgaggaccaggctcttccagaggaccagacaattcccagcacccacatggaggcttttaacaatccctgttctaggagaattgatgccctcttctgacttccatgtgcaccaggcatgtgctggtgcacagaacatacatgtgcacacacatacacataaatattttaaaaagagaaccaactctatagagttgtcttctaacttttacccttatatcaacatacatatcatgcacagccacacacacacacacacacacacactataatatatatataatatattatattatatacactataatgtatatataatatatacacatacatagatatatacacacacacacacatatatatatgtaaccatattatataattatgtgagaaatatatttctactaacttgaagaaattaagactttagttagctgaacaggcaataaaaagctctgtcttggggctggagagatggctcagtggttaagagcactgactgctttatcccaaggactggagttcaattctcagtacccacatgacagctcacaactgtctgtaactccaactgccaacttcacacagacatacatgcagataaaacaccaatgcacacaaaataaaaataaattctaaaaaaaaaaaagctaagtggtgttagcacatgcctttagtcctagcacttgagaggctgaggcaggtggatttctgagttcgaggccagcctggtctacagagtgacttccaggatagtcatggctacatggatgaacccagtctcaaaaaaaaaaaaaaaaccaaaaccaaaaccaaaacaaacttcattgtcaaagaatagttttatgggctggtgagatggctcagtgggtaagagcacccgactgctcttccgaaggtccgaagttcaaatcccagcaaccacatggtggctcacaaccacccgtaatgagatctgatgccctcttctggagtgtctgaagacagctacagtgtacttatatataataaataaataaatctttaaaaaaaaaaaaaaagaatagttttatatatcaaaataaaaataaatttgcttcaatactatttgacatttaatccttaatattaataattatggttatttgacctgggaatggacggagcgattgagaggctacacttaccccctcatcttcgccagtatttacaaggttctgcatcttctggggaaagacagtgttcaattcctggtaagttgaaattaaaatgaccaaagttgtccttaaatccagatttattcctttttcagaaattaactggtaataactgaatgactttcttagtaccacaaaactgtttttaaacgtctattgttgttaaagtccagccttatctgggaagcccgctgttccaaagacactgtgatacagaactcctcaatatatttaaaaagaagtaaaataaattttgaagtaaaaagaaggggctggagagatagctcaaggttaagaccctttgctccacaattgaagatttaggtcccaacacccatgaaacaagataggtgtgtcccggcaaacacctgtgaccatagctctgaggaggtagagacaatattatctccggttgtgctctaccctgcaaaaactcggtccccaaggcaggtcggtctcagtgcccagtcagccccctgcctcaaagggaactagtaatagggaaagacagaagcaacctctggggccctcatgtgcacacagacataagcatgcagaagtaaaagtggatgagaaagtctatcagaactcggtttaaagacagcagagtaactattttacatagtttttgttccttgaacttgtcaagaaaatgtgacaaacactgaacggtgtgtatcatcgctgcgcaataagacttcgtttctggattacggactaccactggcaattcagaggaggctgtgcacaggacccgaggaatgtctagtctcactctcttgttttaggatcctctgggagagaggcaggagggaaccaaacccaagttccctgttgtgctagctggtttcactgaggtacactcagccctcgaggtgtgctaggctgtcatcaggttggacctgggagtctggactttttcttttcagtcagggaaagctgcaacctggtattccaagggagtccatgaggcgctcgctgtgtggagtctagaaaaacgaggctcaggatcagactatttctatacagggttgtgctttctcttcttggtctaaggccatcttgaaaaacaacaacaacaacaacaacaacaagtttttcagtgtgtgtgcatggcacacacagatatgttgctgctgtaggccagaggaagggtcagatgccctggagctggtcagcacccgggagctgcctgacctgggtgctaggaacgttataaacttggcacctctgagggagcagcaggcactcataaccactagtcctcgctccagccctggatttttaaatttttattgttttttttttaagatttatttatttattatatgcaagtacaccgtagctgtcttcagacaccccagaagagattcagttatcattacagatggttgtgagccaccatgtggctgccgggatttgaactcaaggccttcggaagagcagtcggtgctcttaaccactgagccatctctccagccctaaatttgtattgttaagagcacaggctgtggtgtcaagactaccttggtcggaatccaggcattaatgctaacaagctctgtagccttgggagcatcaccttccctctttgtgccttggtctctgtactgaacaattcctgcctcggaggattactgtggaatgagctgatacagataaagtacttgctctgacacccagcatacagttctgtagatgcctcgcttaaaaacaaaagctattgcatgctcagaaaaataaatttgcttctaaaaatgtaggttcagtccctacgattacaaaaggtgaacgattagtgttgtaagatatacataaatataaaaatgggtaaatggggtatggtgtgaaacccgtgaatccccagtacttggtgctgaggcaggaaaaacaaggacaaagccagctaggccacatgacaaagccttcctaaaggatggagggagggaaggaaggagggagggagggagggagggcaagcttgcaagccaagcacacatagcaagcatatgaacagatatgcttggagatggacaggtgtttttctgttaatggttaggtttttctcatttttatggcaattcagtatgaagtaggaagatgtgcttaacaactggctttctttttcactaatgaagatctggattcccagacttggccaagctcttctgtctgctgtagcggatataaggctctactccctcctgaagcagctggaaaaccaggaagtggcacaatgggtggtaagtcgaagcactttagacggggtgtgatatggtgtggtgtatcgcatgtgtgggataaacacttcctaagacagctgatccacagaacttcctggaatgtcttccttccataatcagatggtgtatgccatctcctgactgagccccaagtgggacaggctgagtcccaggagccagctatggaggcccttgggcctctaaactgacaggatcctcatccttagactctgggcactggaagctgcttttacagcctagcccctcacccccaccaccctgaggctctcctgagaaattccgggtgtgaggggagggcatcacctggaaaagcctgtcagcttagttcttgttgtttgttgttttttttaaagttctgggtgtttgtttgtttggatttttgttgtttatttttgttcttgtttttgtttttttgaaacagtgtctctctacatagctctgactgtcctggagctcactgtgtggaccaggcaggcaggcctcaaactcacaggaaatacatttgcctcctgggtactggggttaaaggtgtgccccactggtttatctcaagatgggttttcaatacttgcatctccaagtcaagctacaccccagtgggtgactggattacacacaaccactgcttcctcacttgactctgtccacacgaaccatttacagatgtactggttttatcgtttctatcaggaaatacattctgaattccagacttcccactcaccaacacatttctagaatatgatgtatcactaacctggagaaaaggcctatttgtgcagacatgtattcttttacattttaaagaatgttttatcttctttatcttgtgtctgtatgcagtgcccatagaggccagaagagggcatgggatcccctacagctgaagttacaggtgtccatgagccacctcctggggtgctgggacccccctaaacccccatcctctcatagagcaataagtgttcttagcttctttgttttgtttttttacattgtaaaaagaaagttagtttagtgcttaggttcttgctagttgattagtgatgagtttagtggttaggttcttgctagttgattcagacacacagtcagctccatggcaactctgttttgtttttatgttttatatacattgccaaaggtgtacatgaaatgatagcaaatatgccagcccacttttgagaccttccttccgagttctccttaaggaaaaatctcttcttgtaggagaacaagaagccaccgttgctttaacaaggagttagttccttccttctaagatgtggttttgtagacttctgatacttttgtttccatgttcttcaggaaaactgatttttagttagttttcaacctgaaaccaaatgctccctgatgagtcttctcttctcgcttctcttaattttttaccaaaaaaatatgggagctagggcaaaggctatagcttagttgcaggatacctggcttcgcatgtgtgaagccttgccccccccaccaaaaaaaaaaaaaaggaaaaagagataacaggggccagatactgactcaattaagactagcttccaggtcagcatcagctatagcaaaattctaacccttaaaaataaaattcaagccgggcgtggtggtgcacgcctttaatcccagcactggggaggcagaggcaggtggatttctgagttcaaggccagcctggtctacaaagtgagttccaggacagccagggctatacagagaaaccctgtcttgaaaaaccaaaaaaaaaaaaaaaaaaaaatcaaaattatttatgtgtgtgtgtgtgtgtgtgtgtacccctaagagaaaagcactaccgactttacatacatatatgaagaagaggaggaggaggagcaaaaagaaatagggcagcatttccaaaacaaggtccatagatgctcaggatagctgactcctggccactgtgaggtaggaggtggcgcagtagccggatgatctagtgagaagtttcagtattctataaactccactcttagtgtctttgttgtgggtatttcattagcaagaagtaagaattagtcaagtgcaaaccttcaaaaagacctgaaaaaaaattctaaattcaaaaagcactatggcataacaaatacaaacctgttgttggagcgtggggggcatgggctgagaacagtgtgtggccacggctacagcctctgggctggtgctttctacagacgcgaccacctagcttcccacttcccactgcagccatactcactcctgactcgttagttcctctgccagctgtgctcctggttcacatggtactgctgcacacggaccctcacgaacaccatggagacctccctcactgccctcgcccttttctactatcctctggaaggctcgaggtccgtgaacaggtaagatggctgttactgttaataaatgcagacagaagtctaaaacccaagtatcagcgtggcatatccagtagactcccaagcattcctggggcttagaagaaacaaaggttttttttcaatgagtatcacaggaaacagtcaccctgtacagcgaagctaataaaagggatgattacaaagtgtagacaacactcaggaaatcctgtagcacccagagcttactgaagtagcagtctattatcagtgggctccaaagactaggagaaagtaccaggatccgtgtaaagctgtacttgaaggtccccgagggagacctgcctggctagcctttagcaatagccaggagtcagccagaaggataaataaacctcacccatgctgtgactgccttctggttccctaaagcaatcagaagcaaggtaggcttagagcgctcctgcagtctgctgaccagcatgggagaacaggttgggcagatcagaatggcaaaagagaaaaacccagaccaatcagggaggaagggctgagcagaagcacgcagctggagagagctgcagatgccaggctgctggtgtggggagtaagtgaggggagggaggagtgggcaagggtgaggctgggatgggaccaggcccttcgccacacccacagatcatcacagtcaaatctgatttcaaaacaatgtactgaaagctggagatgctggcacacacctctagtcccagcactcagggaggcaaaaagcagacataactctgagtttgagaccagctttatctaaggagaaagttccgggacagccaggggcacatagagagcccgagtcaaaaaacagaaaaaaaagattgtgtcggatggaagggagacaggctttcaaagcacacaacagctagagtgcactctctcttcctgcataaagatcttctagataaaatagctttcctggcttttgttttgttttgtcttgggaaagggcctcactggctgctcctggtctacttctgcttctggggctcactatgtaaaccaagatggctgcaaacttacagagaagcagcctgcctctgcctcccaagtgctgggattaaaggtgtgcgccaccatgcccactaagattatttctgcgttaggttcaggttactgtaaataggatggagggtaccataaggggaaaagaaaagacagagaaaatagcttctcagtttggtctcctgagcctagaatatttcagtcatgtaagatagttaggagatggagactccaagggtgtttagggaaccagctgttttgtgctttatagcctgaggtctctaactccctattttggtcctttatcaccatgagagacctatccaggtcctgtccactgtggtctcactacccattgctcaactttctctgtatgtaacattctgtttgagaaactctgggtagatctgttaaaacatcatgaccctatttgggcacagtggttgcacacttttgaaacgccaacatggaagcagagacaggaggatcagaagttgaaagtcagcctcttttatacagcaagtttgaagtcagcctgggctatataacagacaaaaaatttgtctgggcatggaggttcatgactatcatcccaacacttggaacactcactaaattgctgaacctcacctcgaactcatgatccacctgcttcagtctctggagggttgggatcacacaccctcacactgagaaagccctgacttggaacttcccactgggccttcgggaaggtccctgattccccctcccctgcccagccaattaaaggtcaccagaaccaccaagcattttgtgcctagttgctgttgctataatctgccctcaaaaattgtataaaaagcttatgaaagagagagaagggttcgcctctcctgtgggtgcaggatgaccccagtgtgctggaaagataaacctcttgcttttgcatagaacaaactccgttctcgagtctcagttgggtctcccaggagctgaggctcactgagtcttacaagtgtttacacacaaccttacgtgtgtacatgtgtatgcatgtgcatctctcggatgagtataatttacttcaattttgaaaaaaaaatataataccttccttcttgtgagtggtggtggagtcagacccagggccttagatgctcttccactaggctagacctctgcttcacaaggtcatatgtgcacaaaaggctatcactgcataatcatgctatttccttaagcgtctgcactttgttcttgtctcacagtgaaattagtcgcctgccttcaagctcagtttcccactgtccctgtaacaagctctccttgctcctagcatcaagtactcgctcctggtggcacttgcttgtgtggtccgccccacagctcttatcccatgggtgccgctgctcttcagacatttctaccaagaacagagaaagctccatctgactctgcatcattttttacctgtagggtaagtctggctgtggtgccatctataacatcttactaagactataaggaagatttttttttttaatctttcaactaaaattactatatcagatgtctcaggaaagtttttcccactctagtgtgtgcatgctggaaggctaatgtggaggtcagagtggttccctctgcattcgttccaggaattgaactcaggctatccggctttgtggcaaacacctctacccactgagccatgtcactgacccagtattctattttagatgtctaaatttatgagactgattaattgtatcgtacttcagtgaaacaaacgtgtctattgcttagagtttccacacttcatttcctaaaatttcctatttgtatgggacctaaaacagttttgctcatatatgaccttgtgatctttttagatttaagtgatgctactgttcttattttatagtaaatggaaacatggagaagtttaaagttagcaaagccagcgagctggtaagcgatgaaacaggaactgttaaataggacgagagcgcccaggtatgacgcctggcacagcatctcaaagaaaatcccaactatctcctgagcctgggggtgtgggtgtggtgtaccttgcccagcagagcatgggtttgacatctgcctcagctttctgagtaactaggatggcagacccctgcatgaggcctggcctctgggggagtgccagctattgagccagctccccatactctgacccttaaaggaatgtaaagatcttcagaggagaaaagtgttaggacatacaatgactaaggtgacttagaaatagtgcaaaggcaaacagaccagtggaggagtcaggtttgctcttacttacttacgtgtttgtttttgagacagggtcttgtgggtctgagttcctccctggaggccagggagtttgactgcacttatcccaagcagcgctgggtgggtgttgggctctggggaagcactgagacaccattgggggtctgaggggaatgcagaccgagatgtgggaaaacctgaagctggtatcccctgactttgggcctccagtcactgctggtgaacgaagtatgggtcagtcggtgggggtggggggctgtcccggacctgtgatgagctgaggatgagcccagggcccgggggtgggggtgggaaggatggggggnnnnnnnnnnnnnnnnnnnnnnnnnnnnnnnnnnnnnnnnnnnnnnnnnnccttctccatgctccccatgagacagtccttggttccaaactgtttattggttgttcatcatggaaaatggatgcctacctacttctcagggaggacctgagattaaatacctttttcggggaggaatgtctgggaagggaagcttattggttaaaccctcagtatctcattagcatggagaactgtgttctgggcctacatgaccacaggtcacatttccttatgtgggaattgtggcacagcccaggccaggaatttggcagggagcagggaggctcctaccgtctcaggcatgtccccgagtctctgggacctcagacctgttcttcctcactcagctctctggcagggttcacggtccctcagctccaccttgtctttaatgaaaggagtcattggagtgactgtgttatttgtagtgaaattttgcatggtatggaagcatcaaaataaaacacagtataagccagaggggtaaagaggggtggggactagggagacaagggattattgagccaattaaggtgtctggatgaaggcagcttcactgccccaggcagttccaaggaggttgtggcagcactgcctcttgttttagagagagaaaccgaggagtcgaggagtcgtcctaacaagggagcagagccccagcagggggtgtctgcccaccctcaggggtgtctgcaccggtgggcagtggtgttaagtggtgtaatagtttgcttgtgagttcactgtcatctgctcttgtggtcctagaaaaagccaggctgtttgaggaatttagtcccggaaggcatcctttaagttgggagttattacctgtgttgcattaaggagagcagggggaagagttaaagatttatctgctttggatggctgaggaggaaaacaccatgttagttgcctatctggaataggtagtaacagcttgtctataagaggaaagtggttgttaattaaggaataaatagtagttatcagagtagtttgacctctgggagtagattaaatatgatttttttttaaaaaagattttgttgccaggcagtggtggcacatgtgtaatcctagcacttgggaggcagaggcagggagatttctgagttcaaggccagcctggtctacagagtgagttccaggacagccagggctacacagagaaaccctgtctcgaaaaaccaagaaaataagaaaaaaataaataaataaaaaatgaagacttagttatgtatgtgagtgcactgtagctgttttcagacacaccagaagagggcatcagatcccattacagatggttgtgatccaccatgtggttgctgggaattgaactcaggacctctggaagagcaatcaatgtcttaatggctgagccatctctccagccctgatttttgaatcttaaaagaaattttaaacaaattgaaaatttttagaacaattttaggttagaagacacaaaatgctagggagaaaaataaacgtttaaataaagaagtatgaaaatttggggttaagatgctcaaacattgttttaggtgttcnnnnnnnnnnnnnnnnnnnnatgctcaaacattgttttaggtgttcctgtcagggagagaacaacaaccaataaagactaaaatttggaggttaagggcctgctgtcactccccagctgtgtgctctagtaggcaggttcccgttccacccctctaccccccaccccccaccccgctggtctaccctaaaagtagaacagagaggagagagacgatttggtagcaccctatcaggtataggcaaagtcagagggggtgagacagagcgatagctgtgctctgtctagctgcactagcagcaacgtgggcatgggagggcaagcatatctgtttttctgtctgcactgtggaggagcgctgggcaacggggtgttgctggaactgccggctgggctggggctgtaagggggagggggggcgggtagagagctctgggcatgcgccaccatctggaccggggccctgttagctgtatggcagccctcattgtggggctgggaaggtgtgaaaagtggagagggtaggctagttgctacagtagcagggagagttaagtccaagattagatttggagagtcaaagggacagggagccaggagcaggggttgaaggattaagatggcaagagcagggagagtggggatccggagagaggagagtcacagagacacacacagaaaagtctgggactatggagcaagtgtcagaggtttattcacagtcttgtttaatcaggagttccgatgtgggtctgagtagtcgccagctggggtaccttcagctggccatggtccacatgggcgccagttgctggtctgtggaccagacgatatccagggagggagcattcaagggaaggagaaagagtgcaagcagggagggggaagtgcaaccgctgcagctgcttttgtgctggccctgccacctctgttgttcccagatgctgccctgtctacgctgagctggcagagggttggctagcaagtgtggtgcatggtgatggatttttcacacacctttattctttctagataggatcttctatagttttggagtgggttggagtctaaaagcgggtgcttcctactggcttggtctgagatgttacaggtgcctcatctacactggggggtggggggcgctgcccctatgtgtccaaagcctcagctggcctggaacttgctatgttagccaggctggccttgaactcctatctcaagttctagaataaaggccttgaaagagcataccgaactatctttaaaaaaaaaatgttgagagggcaggaaagatggctcagcagttaaaagcacttactgttcttccagaggtcctgagttcaattcgtagcagctacatgactacatggtggctcacaaccatctataaagggatctgatgccctcttctggtgtgtctgaagacagcaacagtgtagtcacatacaataaataataaatctttgaaaaagaaaaaaaaatgttgaacctacatcccaccataagttattagaaaatccccaagaaaagcatggatctcactgtaaaggtcaaacagcagtgcctctgccaggcagacagactaccccatgaccagagcatccccaggccaacaggaaagcttttgaaaagatacatttgagtagttaaggacctttgtgctggaaaaatgactcagcaacagaggactgacttacttccatgctgaccccagcacagcacaaaccaaaaccagaagttcactgtgaagagagtggaagaccaaatcgacaacatagatgatcaatcaaacctcatgtccagagaggacacaaaacagaaaactgtaagaacagggtaactggaaacaaaccatgaaagaccctactaggtacttcaaaaatatccagtttgagagctggagtcacagtggaaaaaaattttaaaaaaaaagggcagttgttcctcctgcagaggatccagggttagttcccagcaccaacacagattcccaaccgcccataacttcagggccaggggatccaacatcctcttttgtttgtttggctggttttttgagacaacagccctggctgtcgtcgaatcaacactttttttaaaattagatattttctttattcacatttcaaatgttatcccctttcctagtttcctctccgaaaatcccctcccttcccccctcccccactcctgcttcctggccctggcattcccctatactgggtcatagaaccttcacagaactaagggcctctcctcccattaatgaccaactagaccatcatcctctgctacatatgcagctagagacacgagtcccaccatgtgttttctttgattggtggtttagtcccaggaagctctgggggtactgattagttcatattgattaacatccttttttttttttttttacctctgagggcaccaaccatgtacatgttacacatacataacacacaaaacactaatacacatatataaaccttgggttcagtacatttcagaccaatcaaggataggcatagtggcacacacttttaatcccagcactcaggagctagagccaggtggatctgagtctgagggcagctgttctacatagtgagtcctggtacagacagggccacatacagagagagaccttgtctcaaagacaaaaaacaaaacgaaattatatagcagtgtctccttgttagctttctgttgttgtgataaaacactaacccaaaccaatgtggggaggaaagggttgactacaccttacaaattgtatccattacccagggaagccaaggcaggaacctgtagggagacactgaaggaaggaagcctctaaggaatgccgcttcctggctggcttcctctggcctgctcagctgccattcttacccagcctggcctataggtccaatgatggctgcacccacagtgggctgggcactactacatcaattaatagttaagaagatgccacacagatatgccacagacaattacatggagacagttcctctactgaggttctctccggtgtgaaaagttgacaactcatgggatctatgatactgtcagcagccagtgttctaaaaaactaaaaatggagtctcataaaacggaatagaagcagcgtgacagttccagccacgacagtagacgtgaatgactgcagcgcacacacacaggaaagccagtctagtcctagaatcgtgatgccaatgaagctcccagcagccctgagagctgcaaagctgagctctggtaatgatcacttggagccactggcacctcacccactacagttacgactttttaaaccctgaggatttcaaaataatacgtatctatatttttatgttgatgggttaattatctgaggatagatacaatagtgggttttttaaatgtttgcttaagtgcatcttctcatctttcaccatgtacgaccccacagctggcaagcttgtaaagcgttttagagtcgtgctgggacaaagacagtggcctagacttcagcaggctcccatgtgagtcaccactctactttgtttttcagatttataaccttcagtttgtctctgataattgaccgtatcttttttggccaagtaagtaaaaattagagtaagctcaattaggctatctgttctaaccacttactgctctgaaccctcaagctgggctttcagcactttgtatctgatccagctgtggtggcgagtgcttggtgtagtggctcacacctggaatccacaccgaggctccctaactgctagagtctcagcatcacgtaggagctgctcataactgcgggcaattccagggaatctgatcccttctcgaagagcaattaggcatgagggcacgtgttcaagtgcacacacatacaattaaaagaaaaatcaattttaaaaaattcttttctaattggatataaaacaaaagtatgtgtgaatgattattcataatttgagatttaaaccttaaaaaacttagcattttacaaattaacactatcaagtacttacaaaaacaagttattaactggggcagtggtggcccacgcctttaatcccagcacttgggaggcagaggcatgtggatctctgagttcaaggccaacctcatgtacaggacagaccaacaccctgtctccaagaaaaaagaaagagggggtgagagaaaaaaagacagttattaaccagaactcatgtcattacgcagacttagactgctgcctgagtttttagattaaattcttacttaatgttatgattctgtcaaatactataaagtcctagatcagtttttgacactaacccatttttctttctctttcacttgtgccagtggacgctggtccaattaaatttcttgaaatttaacgtgctgcagaacctagggacgttttatggctcccatccatggcactggtacctcagtcaagggttcccagttgtcctggggacccacttacctttcttcattcacggttgcttcctagccccaaggaggctccacatactgctgctgaccgtgctgtggacactgctggtatacaggtaagactttgttcaggcaggtgaatgtttaaatgttactaagagattctgaaactattgggaagttgtttcttagaatacagcagtagagattatgtcaggtgaacaaatgtgctactcaggggacttagacctactgctacatctgtctagttgtgagattaaaatgtggaactggtgggatggctcagcaggtagaggcacctaccaccacccaccaccatgtctgtggccctgagcagtgtcaccacgatccacacaggaggagacgactactgatggccacaagttctggtcctctgacctccacgtgtgcactgtggtgtgagcacctcacctgccacacacacacacacacacacacacaaacattttaaaacattttaaaggaatatattcttattctaaatttgagtaatattacttagttgaatacataaatttttttctaagtgtaattgtactttataatttcactctgacattatttatttatttatttatttatttatttattggtttttcgagacagggtttctctgtatagccctggctgtcctggaactcactttgtagaccaggctgacctcgaactcagaaatccacctgcctctgtctcccgagtgctgggattaaaggcgtgcgccaccacacccggcttcactctgacattattagcacatcaccacactctatttaaaaaggagtacaattcccaagtcggactcatggtataacacctgtaatgccagcaacatgggcttaaacacaagtgtctagagttggctggtaaaaaagttatcaggaaaataaaaggaattcagtgtcaaatgcttgacaaataaacagatcatatagtttaaatgcattaatttctcagactaatataaaattaatgttttgtcttaatatcttttattacagcatgttgggccacaaagaattcaggtttatctatccagttttaccattctgcatggtgttctgtggtaagtatttttaatacagaatacgttttagaaagagtagctaaaagaagccagacttgacagcactgctgtaatccctgccccggagaggaaaaggcaggaggatcaaccacaagtcaagggcagcctgggctttgatagctagatcctgtctcaaaacagcaataaaagattaagagactgtcaatgcccacggagctatttatttccaactaggctcaatgaaaactttcctaattacaaactattaccatagtgtttccttttttgtaatctaatgctctgtgggtgtctgttgtctggttatagaggcagagctgacctagagcaatctatgcggtcagacctgaactcaagggccatcgtcttgcctcaaccttccaagtgctggcattacagatgtgagccactctgcctagctcctaagtggcctttttctgtattacgtaagatacaagaatgatcaccagacagtccactcttttgccaggggtaggaggtaagactggctggctggctgaaacacccatgcaggattcttaccatgtcatcaggctggccttgaactccagattatcctctaagcccatccccagcagtgataggacagcaggcttgctgcaccgtgcagctttccatagaactgttgaggctttccaaaactcacctctaagccttattctgttcttgtgacctattttaacctgtttcatgtaagtgtcactgccagccacatcttaaccctgctcactcacactgactggacagagcactggaagggctctagctgtgtgggccagactagctgtacctcagctccggagccttctcactgcccagtgggttaggtggagcttcttacacggtgctttcagggttccaaggcaagagtgggaaggtaggaggcctgggcctcaaatctgcagttccttccaccagtctttgggtcacagcaaatcaaaagccaggtcagattcaagaggtggttaaaaagcaaggttttgtagtcagtctctaagattccagccagaacccctcagtcctctaaggctaagtctggataacagcatccgggttcctcacagtgaatgctgcatcttggtgtcttatctaatagcccgagcagaaacgctgaggtgcgctgatgtactgccaacaagaatcaggtggcattggcttgctcccagccagtagagccctttgcttcccactgaagagcatttgttctgagttccaacgtgtctatcaacattacttatgcaccgcctcaagacggattctgtgttctaaagccaacgggccagggaaagtggtacctgtctgcacgccagcactctaacagccgaggccagagaactgctggttaaggacagcctgggttacatgcatggcaagagcctgtctcaagggggaaaaaaaattgaaaactccaaaacagcaggtgtggtgtaatccttgtaatccttgcacttgggaggtagagactgaagaaaccaaagttctagagcagtctagtgagacctgggaggcatgaactctaggctccaactcaggcctgtgtggcaagacctttacccctgccacccctcccagtcctctgccctggaagcagctgctcaaccagaagatcttgctgtaagttgcccaggctagccttaaacttgcgcccctcttgcctccaactccctactaactggggtcactgagatcacacactacatagtctccagttaattttgatgtctgatgttcacaattccactataaggtctttcttgggggatttagtatttaggttgtggtcagtgaaaaatacggctttgtttccttacgagagctgcaacctaaacttcctggtgcctctgcctgtgcagaggttaagatacagcgcagcttgcccttccccactggttctccagctaaactacccctttgcttttctcatgtaaacaccacaactgacttaacagccttcctccccggcagtgtttaaaaatgtaaaaattaacatgtatttctaagtgacagaacatactagagaaggcaatggggacttttccttggcttccccccagcccccggagtcagggtttctctgtgtagccctggctgtcctggaactcactctgtagaccaggctgcccttgaactcagaaatctgccctgcctctgctgtgccaccactgcccagtgaccgtgaggttttttggtttgttttggtttgttgttgtggttgtttagcatttcttgccactgcagcacaggaaatggaatgactaaatgaaagctcagggcttcccactctctccacgatgtgaaccaccctggtaagtcaccgttggagaagactgtgtggcaaaaggtaaagctgggcagtgagaaggctccagagctgaggtacagctagtctggcccacacagctagagcccttccagtgctccgtccagtcagtgtgagtgagcagggttaagatgtggctcataggtagctagtacatttatcagcatgatagcacatacctggaatcccaggatttgagagtctgaggccagcctgggctacatagtaaaaccccattccaaaaaccacaaaacccacaagcatacaaagagctagttcacatagagcgggagcggtttgtatttgtgttgagatggaagccaggcaagcaacctggcacttagctacatctcagcacaacacttcttaggaccagacaacaggagcaaagtaggcacttggagtgatgcttctgagaactacacgtccatactacatgcaaataaaaacacctactgggtgtgggatctaactgggtatgtctgaacaagcagtattgctcctgttaagaaaatcatgaatcttagtccaggattgctgtttaactatgcccttccaattgtcctggaatcaaacgtcagaatccccttggaaatcttaggatgtcagatgccctcagagacttaagtctacacgttaagactggacagccattacccacaccgtgccttgactgactaggcggctagactttgcctgagagtgcagtggtggcgagtggtcagagatgactcgctgcctgtttgagtttgcctcacagtaccactgcttatgtctgcatggaaaatcatacaagtgtatttgctgataacaggaacaggaagctgcccgtgttccacttacccacctatctccatgcaggttactcactagcccacctgaagacatggaggaaggcagccctgagcttcctgctcttgtcaaatgtgccactggcattctacactggcctagttcatcagagaggcaccctggatgtcatgaatcacattcagaaagtctgcccccgaggtcctgacccagcttcggcctcagtattcataatgatgccctgccactccacgccttactacaggtgaggaaggcagttctgcctgggctcaaggtcagcctgaaaggacatggaaacttggacgcttgtgcttgcttgcactcgctctctctctctcttatttattttatgtgagtacactgtagctgtctttagacacaccagaagaggacatcggatcccattacagatggttgtgagccaccatgtggtttctggatttgaactcaggacctctggaagaacaaatggtcagtgctcttaagtgctgagccatctcaccagcccagggtgtctaactctttggccctttcttccacagccatgttcactgcccactgtccatgcggtttctccagtgtcccccagacttgactggaaaaactcagtatcttgatgaagcagatatgttctacttaaaccccttaagatggttacaacaagaatttcacagcaatgcgtcactccccactcacttggtcaccttcaatgttctggagaaggtatgtcaactcaaaggttttcattcgattaacaaccatctgcctcaccgacccctctcgccctctgtatgaattggttctctaatggctgcggccaaacacctgacaaacctgacttaaggagacaggcttcaccccggctcagattcaggacagcagcccagcgtggccgaggcagcatggtgctgggtggaacagcgtggaacaggtggatcatactgggttggtctgctcttccctttattcagcctggaccacagcccacaggaacgtgtcacccacattcagggcaggtcttccctcaaggctttaaaaacttacaaacttaggaagtgtgcttcactactgccttgtattgtttcctcgttgtgtacgtgtaaccatgtttctgtgtacacacgtggaagggccagaggttcaagtctatcgacgccgtctcctgtccctttccacctcattttctcactaaacctggagcataacaactgtggcctgccacagcctcccaaaccctctctctgccccactccaatgacccactgttagggctacagttatgtgccaccatgtctgagctatttttgagacagggtctcacaatgtagccctggaactcacagaactccatctgcctcccaaccgctatataggactaaagacacgtgccatcccacccaactcccacgtccaactcttcatgtgggttctaggggtctgaactcagatcctcacgcttggtcagcaaccagttgaccaaatgagccatgtcccctgcccaccctaatggctggcctcaaaccctgagatccgcctgcctctgcctcctgagtgctgggatttaaggcgtgtgacaccactgcctgtgtctaatagtttcttaatccagtaaagttgacaaaatataatgattcccataattgatcctttccccagtaaaatcagctgttctgtaacttactagatatgtttagctaccagagtcacgcctttcagaattgcttcgaaaaggaaaaagtcacaaaagaaaaatcgtaattggcaactctagaattccttgaagtcgcactcggcaaacatgtctttatttgcttgcaggagatcaataccttcctcacctcagggaactacgagagggccgctacattcttccacactcactggccagagcgccgaactggaagtcacatacacgtctacgagcgaaggttacccggcagggtcaacacaggagggaactgaactgtaaggacttctgcagagacgttggcataactgagagaaactgtaggtgaccgtgaaatgagaggaagccactggggacagctgtcccatacactgtcctgaggcattctcagagaacacaaatacggcgccagacttgagagagacctttagttttcctcacggtgcagtttattgtttcttccatagcattcaggtgtgcaagagagttcacaagacaagccagccagctcttcacaaaccaacgggctcttgaacccacagagagacaaaagcgtgagagtagagatgttagcgcggagtcccgcctcagcacagtcctcaggccctgctgcacacctccacacggcacgaaatgcctgtgtgagctgagctcagctcctcaaaccaagccctgtttcatgcacagactatttcatgcctggcttccttaataaaactaccatttcccccacccccccccagcaggaaaaaaagtttttgtttttaacaaacctaagctacaggaaaatgcaagttagtaagctttgcttttgcataatataaagacagtcatggggagttcatctcaacatcaaaccaagtagatagcatccacagctcttaacttcctaacttaatcacaaatcagtacttaggatcgaaaggtaactgccccagttctagctcaagatttgccgtgtgtcttccgttagcgcgaccgtatttttgccatttaccttccctttcataaggctgtggatgaaggtgcttctgctcttgttttcggtgcctggcgttttcaatagttaccatacgttgctttttatcaggtcgactgaaagtagtaaacacatttttttaatctatgttagagttcagttttctaaaagtaaaaagaacaatgtttttccccacttatctacctgaacactgcaaaaagataaaacagaaaataacatcctactctaattccaggaaaaaggggtattatttcaacactgaaggaaaaagggcagacatcaatactcccgcactggccggaaggggaggcctgacaggtgacgaggagcaggaatgtaaccataaaataatgaggcgtttccgttatcactccaggaagcataagaacaaccagcctcgtctccatcagctttatccctcaatgagagaagagacacagctcgcagagcagtctccaaccttcccccgttccaggcaagtgcagtgagcaggcactgctgtcttcccactctgcctgctggctcctccactgccttacgccaggacctgcacacaagcgctctgcagcgctcagctctaagcacctgacttgacatctctgggttcacgtgcatcactctgcactcttctcgcttagccttctctctaaccagcacagatagcattgtcccctgcactagaccaatggggactggcttcgaagtgagtagaaatggccatgtacctaccaacccgtcctctccaaataaatgtcaacagatacctccaaaatcaagttgcttctggttcctcttgcttagagcttccttctggagttctgagtaatctcagcatccaacagtgaagtcattccaggtgaacctacaccacttactttctacttcccttacacaaggtagaagtgtctggctatgtgacttgttgacaatgtatcttgtctgctcctcaccacctctgatgacctcattcaaactcccatcagtttctcatgtgcagaccaccacagctggcttcacaccttgccaatcaaccctcttggctgctgccagtcatctagaggactaggcaccatcccaccccgtgacaagatccttcagaaattctccatctcacaagacaggcacttgagggcaaaagggagaccttcctgatcacgccagctcacctggtttctgtaaagtaggtctccatctctccaacctctgcaaaggaccttccgttccagggaggccctgctctatccacgcaccaaccctcacttctctcccagaagctagtttcatagcaagtttagatgcaaggtcacttcaatcatgaagattttctaaccatctctagacaacctgaggtcactacaccttcatgcctctctctgcacacctaactcttgaacagcaagaagttatccacgcttccttaaagcagcctccaacattgctcattaaagcatccgcttcaggaactaaagacatcagaaagcagtctcattattttataggcacactgcatttattcataaagatggaacttgactctcaaaagtaaacagacatttacagttacagaataaaaagctgaaggacaacagacagtcttgaagaacattatgggattttgtggctcctgagcgtccagcacccttctcagttttaaccctgtaaccagtactcctaaactcaataaacctgacagtgattatagctgggcagctccacatgacccgggcttcacactaaagtctttgtttctagcttcctaagttaaagattaaagggaaataatttcacttaattatataaactatactgaaaaaagctagattggctcaattaaannnnnnnnnnnnnnnnnnnnctaacatagattaaaaaaatgtgtttactactttcagtcgacctgataaaaagcaacgtatggtaactattgaaaacgccaggcaccgaaaacaagagcagaagcaccttcatccacagccttatgaaagggaaggtaaatggcaaaaatacggtcgcgctaacggaagacacacggcaaatcttgagctagaactggggcagttacctttcgatcctaagtactgatttgtgattaagttaggaagttaagagctgtggatgctatctactcatacatacatacacatacacatcctttaaatttttaaagtagaaattcaatcatttgttcaagtctaagtgtttgacatggactttttttcagtttgcaataattataatttataatataatttccaaaagctcaaagtgttaaaagataaaataaaatggtatgcactgtttagaagctattatagtaacatggttttatgtaaaccgacctgggtccgaatggcagggcaaaaacatgcccaaagtgtctatatatacatccgtccaacttctccagattgccatcctctactcgatactcctttatgctcttaaggtaacctttcacatcatcaacaaagtcggcgaagagctgctggtcatgtctaaagacaccattcggaaaaaacggactgataaactgatccagttctttccagtggtgaaaagtctccagttcattgagtaagtaccagtgaatcagctgtttgaagtcattcatcctaacaggactcgccttattaacagggctaatggcttcctgtccagcacattcaaacatacctgaacaaacccttctggtggaatgggtgcctctgcagtcagacttggccttgtatgtatatgaatttgcattctttctaatttcttcagagtgactgggcttttctctccctccatccctctgtgcagaagggcgcctgcaattctggttttggtttggtgcctcctgctgtgagtatgaggaataactataagctgttcttgtcttttcagttgccgcttcttttggagccctgaatctcttgctgcccttttcatcaaagatattcttggtagtatctttgaaatggcgaaaagtggatttgactgaatctgagaattttttcagattctccttcacagcttctttcgcctgcttgattttttctttatgatgtctcacaaactccttggtagaattcttcatagcatcaaatgtttccttaactgtccccagaaatgtctccttcgacttgctcttcgccctgtggcttcctctgcttcctctcttcctcccgtctgtctcctgctttccatgttgatcctttgcctcaacgtacagtctctcccacaaatccgagcgctgctgctcaaagatgagcttctgctccagctcagccagcctctgctgtaacagccccacttccttctcttcagtctgcacactaggagactccgcacggctctgtgcctggccagggatgaactgctcaagttctgcccgcagagccatggctgtgagctgttccctctccaggtcccttttcagcatccttgcctcctccaagagcatctccctttccctaaggaagctatctgttttctgcttttccacttctaagtactgcttaaggacctggttctccctaactaactgcgtgcttgtgcctttatcctccaacaatctaatctgctcccttagttgccgtagctcttcctgtaatgaagacagggcttgttcttccttctccagagatattcgtaaatactggttttctgcagcaaggttcttcttctgagtttcaaaggtaatcttctctgattcagtaacggtccaacacctctcaaggttttctttcagcgactaaaggaaagaaattttgttttaatgaaagagaagagaaatattaagtgcttggaaagttcaatctaaatctttaatcatgtaaccaccatgccctttagtgcctctgtgtgtgtgtatgaccatgtgcgcaaatactttgggtatggttaaatggtgttaaaaattggaaaataaatgcttaatgacacttgccatatattcaagaggcttctcattctaaaaagagaaagggaaagggaaagtgtcacatggaagaaaacgagaagcaggcaggcatgtcaaatcaaggacactgttgaggaaggagaattcaaacaagaacaagtaggtagaattccatgtgtgtctaacagcctaaaagccaaggactgactagcagacccaagtccccagagtccatgcacagtgctgcaaacagacacatcatcggaatacacccatttctaagctagaaaagtgagggaagccctcccatcttgttaccacaatagctgtcctgaaaaggtgcctacacggtttagagaacattttattctatttattttttattttcagaaagggcctctctacatcacgctagctgacctatcacttattctgtagaccaggttggcctcaaactcagatctgcttgcctctatcccaccacacccagcaactaagagattttaaagtaagttgcattgccttctgtaagtaacccacaatcagctatttgtatatctgtatcctcatgtccccagactcagtactgatgaggataaaaaaatattcagagagcagcatggcgtggcagtacccacctttaatcccagcactagggtggcagaaaaggctgctgtgtgtcagtacagaatctcatggaagcatctctgtacacagaggacagcctgaatccttagcatagttaagtactttcccaaatccaagtaaacttgaattcagaaacaaacaaacaaaataagtaataagagttttacacatgagaaacaactgaaatagttgttttcctaaatcaatctttagggaaaaaaaaaaaaaagaaagaaaagaaagaaaaggtttaaaactgtattttgcaagccggctctgctggcagaggtgcctgccgccaggcctgatgacctgagctggattccataggaccagcatggtagatcagagaactgactcctgaaagtgattttctgatttccacatttatgccatgcatgactacctttgtttgtgtgtatgtgtgcatgtggaggtcagtggacagcttgtggctgggggctggcccacctctctcgtccactactcttcattgtaacgacacctaactacttcactgctggtttctacttttcttcttctccttggctttctgaggcagggggtcactaagaagcacaggctagtcttgaacttggcctgattcatattgcctaggttctcaagtgccaggttaggattacagtgtgtatgtgccctcacacctattagttatttttcgatgtttaattaatacataccttgaaatctagaaaagactcttgttcctgcttgcgctgtgagagataacccttcacaccatccagctcatcttcgtgggtctttctgactaactgcttctgaatctggattgtgcctgaaaggaaaaaccattatagggataacataacataactgccgctactggaaaataaatacacagcacactcggcctacaccagctccttaactagggcaggacattctttaccccaacacattcacggtgtcactcctcaaacaacagtggatgctaatgcatagggcaagcaggttaacgatgcagcttcgttcattcagcatgcacacaggatcgcttaagtagttcactacccttccaaagaaaaacacgggccactctaataacccacccttcccccaaaaaaccacttctcatcttgctataccaacagtactcagctttgagatcgctgaagtaaagtgtttcaacctccttaaacagaaaaataaggcattggtggagttcttttcctacaggttgagtcaaaaaaaaaatgaaaatgtttcttaataatttgcctacaggctacaactcacacactgaaatataacacagggaatgcctaattaagaacacccattattctcaaagtcaattttctattttacttatcttttaaagacagggtcttaagttatctcgggtagagtcctactccctatttacctgaagatgatctggacctcgattctcctgcttctactgtttttgtgtttatgagacagggtgtttctgtgtaactgttctggctaccctggaaaccttttgtagatcagctggacttgaacttacagagcacctgcttttgcctcctgaatgctgggattaaaggcatgtaccaccaccacctggcaaagaggcttttcgtttgtttaactgtttttgagactgagtctctggcagaccaggctggactctatgaactatgacctggagaatgaccatgaacaacctcttctgtactagagtccctgcctctagggagctagcactgcaccaattcctagtttttatgttgagcaaggcttgaacccaggagtatgtgcatgctaggcaaacactctaccaacagagctacatcccttctactctttaaatactgagattacttttaaaaaatatatacatatactattttggaggagggaacatgcatgccatgacacaaatgtggaggtcagggaaactgagaggagctggatctcccctttcccatgtagaccttggcgatcaaactcaggccaacaggcttgaaagtagcacccttccccactgggctgtcttatagaccctcaaagcaaatgtattaggaagtctgcaatagagcagggcagtggaagagcctctaactaccatccgcaaagcccccaggtggtcatccagtactaggacaattccttcgtatttgaccttaaattcaaaatgttcttttgccaagacatgctgtttgcatgctcctgctacatgtatcatacaggaaagaaaaaaaaaaccaccactaaaccaaaaagtgtatctgacacttgggtataccagtgcatgcagaagtttaaacataggatgtaaccatcccttttaattccttctacaggtcttgaaactcactttgaacatcacttaacaatctaggagtggaaattcagctgagttgcagaaggactaccacatcatctagctacttcactgtctagcaggactcttccactaaggaaccgtttacttccaatgtgaagcagctagcacacttcctgaattgttgatagactaccaaactgaaactctaagctggaaaccacgagtgccctccccattctcacctcttccttgatccttcaccctaatcctcaaggcctgacttcagcactagtatacagattacaaaacccacagcagttccagctggccgctagcttcttttatttttatcttttccttttcagttttttttttaaatggttgttttcagttgctccataaatcaaactttctcactcagcatcctaaactgtattcagacactagaagagggcatcagatgagccactatgtggttgctaggaactaactcaggacctctggaagagcagtcagtgctcttaaccactgagccatctctccagcccccttaaagacatcttttatcattaatctaggtaaattttgtttccaaaagggtttatagagttgccattcctggaatggtctgctttccctcctgcctgtcgtaagcttacgaaaaacccattcaaggatgactgagtaagttgatatagccatggatttcaatgcctctttgtgctgtgtaacttctcatctagttacagttacgtcctcagaatggctggacaacctgtcaccaccttctacctaagtgtggagagatgagcaaggacggagaagcacttcaaacatgaatttggtgttagctttcttatagattatttatcttctctgctaatttttatctttttccaaaagttcagatgcacttttagaatctgaatcatgtcaatgtcactatcttttgctttctcttctactacagacaggaaaccccacagttatacaaagccaaggctggctgtgttctagtagactgtttataagacatggctgcttatagatacagatctcagagaagatatgtcagcatggagctcactgcccgtgaaaatactgagaggtcactgagtcagggcttagatatggaactcacttcatatactgcatcatccagtgttcccacactgtgataaggctaagactaaaagttacagaaaggaaggtagtgtgttaattttgttaatttagttttagaagaactgttctaaactgtattttcttaaaaaaaattccaaagtcatgcaaattgtgagattttagtgcagtctgtattaatattcacgttaataaccaactcttggcttttagtaagaaaaaaagattttagaccttttcccttgtttccttcatttttacctgtaggggggcaaaaatacactcaaaaccattgataaaatttgtgcctgagagcacatcacactagtgtggctcgagtaagtacttggcaggacacacatgggcaggcctccccacgagcccaaataccaccccaagctgaacacaggaaacataggtcagcaactttgactttagcaagtatgggctgcccgatcatctcattccaatatcacgctctatcaaatacctttcccacattcgtgaaagaatgtactgttgaaaagaactattaaaacagaagactgaagtataggttatgtagaccaagaaaaggaataaatctaaaagtagtttatataagtaagctaagagtgttcaggttgctaggcatgatggcaaagataaactttagtccagcacttgggtggcagaggcagatggagctctgtgagtctgagaccaacctggtctacagagtgagctgctacacactgagttcctagacagccagggctttttcagacaacaacaaaagagttgtgaacttgacaaggtttaagacactgacttctcaagcatacaatacctctctggccaggcagcacaggtctataacctcagcactcaggtaactgagtcagagctcagcctgggttacacagtaagaccctgttttaaaaaccatagatagatagatagatagatagatagatagatagatagatggatggatggatggatggatggatggatggatggatggatgaccctgttttaaaaaaccatagatagatagatagatagatagatagatagatagatagatagatagatagataggcaggcaagcagacagacagacagacagacaggtgtaaagtcctacttcaaaaaccagtctgaccccaaactcaagaccctctgcctgccctgggtaaagccatttaacaccacgcccagcacctccgatcttttttttattcgtgttttgcctgcatgtgtgtctgtgcactatgtgcatgcagtgccctaaaaggtcagaagagggcagctggaatggcaatggttatgaaacagccagcatatgggtttggtgtaggagactgaaactggggcctctggaagaatagcctagccactgcttttaaccactgagccacctccccacccccaacttcagatttttaatttccagtcttcttacttaaaaaaaaaaaaacattacacaaatatgtatgttactagtccttatttatacttgagattttgatgatgtatgaagattacaggttggagaccagcctgatcttgttttgttttggaacagggtctcactatgttgcccaggctaatctcaaattctgaagactcagcaaccttcacttgtgcctcctgagtaaagtagctgactgcaggtacaggccacagaacccaacactgaccttttgtgccatcttgtcttgctgctatatgcaa

SEQ ID NO: 1123 - DNA, 2193 bp, Mus musculus
gccggagcagcgaagggacggcggctcgcggggcccaatcttagtggcatgtgtccgcctacaagaaagtgaggggcgggcaccgtgggctgcaggtagccggggaggatggagtcccaggccgccgactataacccggcctcccgcaatctccacggcagctcgggagaaatgaagctgcggaggaggaagtccaggcagtacgtgagcgcgcaggagaaacgctctccgcgccgtggtcttcttggagaaaacacttacctggtcttgtttaccatcgctctgcgaatacttaactgcttcttagtgcagacaagctttgttcctgatgaatactggcagtccctcgaagttgcacaccgcatggttttcagttatggttatttgacctgggaatggacggagcgattgagaggctacacttaccccctcatcttcgccagtatttacaaggttctgcatcttctggggaaagacagtgttcaattcctgatctggattcccagacttggccaagctcttctgtctgctgtagcggatataaggctctactccctcctgaagcagctggaaaaccaggaagtggcacaatgggtgttcctctgccagctgtgctcctggttcacatggtactgctgcacacggaccctcacgaacaccatggagacctccctcactgccctcgcccttttctactatcctctggaaggctcgaggtccgtgaacagcatcaagtactcgctcctggtggcacttgcttgtgtggtccgccccacagctcttatcccatgggtgccgctgctcttcagacatttctaccaagaacagagaaagctccatctgactctgcatcattttttacctgtaggatttataaccttcagtttgtctctgataattgaccgtatcttttttggccaatggacgctggtccaattaaatttcttgaaatttaacgtgctgcagaacctagggacgttttatggctcccatccatggcactggtacctcagtcaagggttcccagttgtcctggggacccacttacctttcttcattcacggttgcttcctagccccaaggaggctccacatactgctgctgaccgtgctgtggacactgctggtatacagcatgttgggccacaaagaattcaggtttatctatccagttttaccattctgcatggtgttctgtggttactcactagcccacctgaagacatggaggaaggcagccctgagcttcctgctcttgtcaaatgtgccactggcattctacactggcctagttcatcagagaggcaccctggatgtcatgaatcacattcagaaagtctgcccccgaggtcctgacccagcttcggcctcagtattcataatgatgccctgccactccacgccttactacagccatgttcactgcccactgtccatgcggtttctccagtgtcccccagacttgactggaaaaactcagtatcttgatgaagcagatatgttctacttaaaccccttaagatggttacaacaagaatttcacagcaatgcgtcactccccactcacttggtcaccttcaatgttctggagaaggagatcaataccttcctcacctcagggaactacgagagggccgctacattcttccacactcactggccagagcgccgaactggaagtcacatacacgtctacgagcgaaggttacccggcagggtcaacacaggagggaactgaactgtaaggacttctgcagagacgttggcataactgagagaaactgtaggtgaccgtgaaatgagaggaagccactggggacagctgtcccatacactgtcctgaggcattctcagagaacacaaatacggcgccagacttgagagagacctttagttttcctcacggtgcagtttattgtttcttccatagcattcaggtgtgcaagagagttcacaagacaagccagccagctcttcacaaaccaacgggctcttgaacccacagagagacaaaagcgtgagagtagagatgttagcgcggagtcccgcctcagcacagtcctcaggccctgctgcacacctccacacggcacgaaatgcctgtgtgagctgagctcagctcctcaaaccaagccctgtttcatgcacagactatttcatgcctggcttccttaataaaactaccatttccccc

SEQ ID NO: 1124 - protein, 537 aa, Mus musculus
PGRMESQAADYNPASRNLHGSSGEMKLRRRKSRQYVSAQEKRSPRRGLLGENTYLVLFTIALRILNCFLVQTSFVPDEYWQSLEVAHRMVFSYGYLTWEWTERLRGYTYPLIFASIYKVLHLLGKDSVQFLIWIPRLGQALLSAVADIRKLLKQLENQEVAQWVFLCQLCSWFTWYCCTRTLTNTMSLTALFYYPLEGSRSVNSIKYSLLVACVVRPTALIPWVPLLFRHFYQEQRKLHLTLHHFLPVGFITFSLSLIIDRIFFGQWTLVQLNFLKFNVLQNLGTFYGSHPWHWYLSQGFPVVLGTHLPFFIHGCFLAPRRLHILLLTVLWTLLVYSMLGHKEFRFIYPVLPFCMVFCGYSLAHLKTWRKAALSFLLLSNVPLAFYTGLVHQRGTLDVMNHIQKVCPRGPDPASASVFIMMPCHSTPYYSHVHCPLSMRFLQCPPDLTGKTQYLDEADMFYLNPLRWLQQEFHSNASLPTHLVTFNVLEKEINTFLTSGNYERAATFFHTHWPERRTGSHIHVYERRLPGRVNTGGN

SEQ ID NO: 1125 - DNA, 57224 bp, Homo sapiens
gacctgtgtaaggactcctagagctattcctggtttttttatgacatataaagaaaagtcttgccccatcggcaagcttaacactggggcttgggttagggccttctttagggcctggaaagccgcttctgcttcaggtgtccatcttactaaatgggtattgactttccaagtttccttaattagtgtatacaatggtctgtctatttcaccgtacctgggaatccatattcgacagaaacctgttatgccaaggaaccctcttagttgctttagagttttgggatgaggataagccagtataggctggatatgttcctcactgagggccctggtgcctttggataattttagccctaagtattaaacctgctgagagcagagctgaacttttggtttggaaaccttgtagtcacaggcagcaaggaaatttaagagcgcttgggtggcttgatggcacaaggtttctgaatgggcagctaaaagtaaatcatccatgtaccaaaggacaagagtgtccaggtatgagaactggcttaagtctcgggttaatgcctggccaaatagatgggagctatccctgaacccttggggtaaaacagtccaggtgagttgagatgttgggttcaaaggatcttcaaaggcaaacaagaattgagagtcaggatgtacagggatacagaaaaaggcatccttaaggtccaggactgtaaaccactctgcttcctctggtatttgggaaagcagagtataagggttaggtacagctgggtgtagatggacaatggcctcattgataatcccgaaatcttgcactaacctccactgtccattgggtttctgtactcctaaaattgtagtattgcaggggctactgcacggttttactaggccttgggcttttaggtccttaacaattttttggagtccttgttgggcctcgggtctaagggggtactgcctttggtagggaaaggaggcagaatcctttagtttaactcgaacaggacgggcattctttgctcgtccatattgtccttctgttacccagacttcaagcaggggacaacaaacgggtgttccttctcctatgttcaggtgtataatggcccctgtttttgctagaatgtctctccctaacaagggtgtggcaatttcaggcataattagaaaagcatgtgaaaagagtaaagttctccagtcacaacttagtggctgggagaagtatctagtgactggctgtcctaggacccctcagatagtgacagatctggaggacagttgtccaggacagaagagtaagactgagaaggccacgccagtgtccaggagacagttaacctcctggccctcaatggtcaagcacacctggggctctgtgagggtgatggcatgggctggcacttgccccgggcaccctcagtcctgctgctggatcatctggctagtggcttctgactcagaggaccttcatcccctggggcagtgggccttccagtcattcccttgacataaggggcatggacgagggggtggcttatttctatttggacaatcttttttaaagtgtccttgtagaccgcactgaaagcaagccctattaggcattcgatttgcccagcttttcccttttccagagcctccaaagtctgcttgcctgagggccatgactaaagcaatggcctttttttaaatcccatttgtcccattccacctgctcctcctgatctctattataaaaaaccgaggttgccaagttcaataggttttctaagttttgctccgggcctaaggcagacttttgaagtttctttctaatgtctgcagctgactgagtgataaacttatcctctaagattagttggccttcaatataatcaggtgacagagaggtatgcttcctcaatgcctcccttagtctcaccagaaaggcggtaggattttcttcctttccctgtgttacagtggacatcattgccaataattcataggcttcttcctagttttccttagtccttctaatacgcaggttagcaaatgtctgcggcaccaatctccatatcctgattctgtgtcccactgagggtctacactgggaactgactgctggcctgtggggaatttttctctttcctccgttgtcaccctatcattgacctgactgagataccagagatcgccaaactctcaggctgcagttatggcagcacttctctcatttggagctagtgtctgatttagcagtaacattgtatctctccatgtcagatcaaaggactgtcctaacccttgtaaaacctcaacatagccatcagggttatctaagaatttacctaggtctattttaatttgctttaagtctgagagagaagaaggtacacgcactctggctgggccgaattctcctcccactgcttggagtgggcataatcggggaaaattgcactctgtggttcattgtttacccctttgtctatctccttttggacagtttgggttgaaggggggtccttattagttggggaaggagtcgaggggacgctggggtagggaggtagactctgagggcttcccgtagggcataaatcacactttttacataattgtgagttgtctcttaatgaaaagaaagtttgtacatatggcacttcactccttatgccttcttttctacaaaagaggtgtagctgtaagctagtgttataatttatacttccctcaggaggccaggtttctcccccttgaagaggatatcgtggccaggtggtactgcagaagaatataagtcgtttatttcttagcatgtgagagtccagttggtcccaattctccagaatacatctcaggggcgtttctgccttggggggaacgtttcccattgctttggagatcccttcgtggtcaccaaatgttactgggggtccttactcccagagctcccgatagtggcaggctgcttccaagacggtggcaagcctcgtgttctctgacctggggttcttggcctcacggattccaaggaatggaatcttgggccatgcggtgagtgttatagctctattagaagccgtgggtcacggaagagaaccgtggaacccagtgactagtgttcagctcgattaggacgaacccaggctcttagccgtgcaggaacaatggcaagccttcagtccgatcaggagtggcaatgggcgcctcgctggatcaggagcacagcagacaccctgctggatccggagggatggaagtcagcggcgggtctgcgacagcggcaaacaacaggggtggacggcgagcaaaagctcagctggagccgtaacaaatatggaccagaagactgcagaagcaagacttaatagagtgaaaacagagctcccatacaaagggaggggacccaaagagggtagccctgaacatatattttcaattatcttgggcatatgcctgtaaggggaattgctaggccatatagtagctctacgtttaaccatttgaagaactgccaaactttcccaaagtgactgcaccattttactttccaaccagtagtgtatgaagcttccaattgtttcacatcctcaacagcacttgtaattttccatctttttgactgcagtcatcctagtgaacatgaaatggtaactcagtgtggttttgttttcaacgaatgcaatatcttcaccaggaaaaaaaaaaactcagcctctggcacttggtatgtaacaactaaactggcatccttttcaaaagggggatcaaaagcagcttactttaacttgatgtgttaggattattcctcaaatgtattaacattatgtattcctgtcacgtgacttgactgtgcatcctatgagaagagtccatgtcccttgccttgatgactttaggcttgagcatgtgacatgctctaagacaaaatatgagaagatgtgataatgtgccacaattgagcagaaacttacaactgctctccatctctctctctctcctacactctgtcatagccctgacagaggctgctccttgagccccggtcccagaatgagaagacacaaacaacagaattccagtctagagctaagcaaagccaaacctcttacccagcagacatttggtatttaaattaaaatttttataactacttttaagtgcataggaaaaaatcttgccaagcacagtggctgacgcctagaatcctagtgctttgggaggccaagggaagaagatcgcttgagtccaggggattaagaccagactaggccacagagtgagaccccatttctacaaagatttgttttaaataagccagatgtagttgtgtacaactatagtcgatgagacgagcggaatcacgtgagcccaggagttcaaggttatagcgagcaatgatgatactacactcaagcctgggtgacagagcgagaccctatctctttaaaaacaaaaaacacaaagaaaacctcaaaagatcatactaaattgttaaaggtactgaataaatccatttatacaacaataattttcacttttcactttgttcattttgtaatattagaatgctttaaggaacatatagtacttttgtaatttcttcattttctatttttaaaaattacctatgctacgccaggcgcagtggctcacgcttgtaatctcagcactatgggaggccaaggcaggggtatcacttcaggtcaggagttgaagagcagcctggccaacagggtgaaaccccgtctccactaaaaatacaaaaattacttcgggaagccgaggcgggcggatcacgaggtcaggagatcaagaccatcctggctgacatggtgaagccctgtctctactaaaaatacaaaaacttagccgggagtggtggcaagcacctgtggtcccagctactcaggaggctgaggcaggagaatagtgtgaacccggaaggtggaggttgcagtgagctgacatcgtgccactgcactccagcttgggcaacagagcgagactccatctcaataaataaataaataaataaataaataaataaataaataaataaaccgggtgtggtagcaggcacctgtaatcccagctgctcgggaggctgaggcaggagaatcacttgaacctgggtgggagaggttgcagtgagccaaaatcacgccattgcactccagcctgggcatcacagcgagactgtatctcaaaaaaaaaaaaaaaaaaattacctatgctggtctccacctaacatagctgagattaaattataatgaatttacattttaagaaaaaggatatcaatataaaaacatgttgatttagataaagaactttgtacatatgtgattacatttatagatctcattgaaaacacaagcttaatggaagcattccctttgaaaaccggcataaggatgctctctgtcactattcatattcaacacagtactggaagtactggccagggaatcaggcaagagaagaaagaaagggtattcaaataggaagagaggaagtcaaattgtctctgcagatgacatgattgtgtatttagaaaaccccactgtctccacccaaaaactccttaagctgataagcaacttcagcaaagtctcaggatacaaaatcaatgtgcaaaaatcacaagcgttcctatacacccttaacagacaaacagccaaatcatgagtgaactcctattcacaactgctacaaacagaataaaatgcttagggatacaacttacaagggatgtgaaggacctcttcaaggagaactacaaaccactgctcaaggaaataagagaggacacaaacaaatggaaaaacattccatgctcatggataggaagaatcaatcatgaaaatggccatactgcccaaagtaatttatagattcaatgctattaccatcaagctaccaatgactttcttcacagaattagaaaaaaatactttaaatttcatgtagaaccaaaaaagagcccatatagccaaggcaaccccaagcaaaaagaacaaagctggaggcatcaagctacctgacttcaaactatacaaaaaggctatggtaaccaaaacaccatggtactggtaccaaaacagagacatagacaaatggaacagaacagaactcagaaataccaccatacatctacaaccatctgatctttgacaaacctgagaaaaacaagcaatggggaaaggattccctatttaataaatggtgctgggaaaactggctagccatatgcagaaaacagaaactggaccccttccttacaccttatacaaaaattaactcaagatggactaataacttaaatggaaaacctaaaaccataaaaagtctagaagaaaacctaggcaataccattcaggacataggcacgggcaaagacttcatgacaaggccaccaaaaagcaattgcaacaaaagccaaaatcgacaaatgggatctaattaaagagcttctgcctagcaaaagaaactatcatgagagtgaataggcaacctacagaatgggagaaaattttcgtaatctatccatctgacaaagggctaatatccagaatctacaagggacttaaacaaatttacaagaaaaaaacaaccccatcaaaaagtgagtgaaggatatgaacagacacttctcaaaagaagacatttacgcagccaacaaacttatgaaaaaaagctcatcatcacttgtcattagagaaatgcaaatcaaaaccacaatgagataccatctcatgccagttagaatggtgatcattaaaaagtcaggaaacaacagatgctggtgaggctgtggagaaatacgaacgcttttacactgttggtgggagtgtaaattagttcaaccattgtgaagacagtgtggcaattcctcaaggatctacaaccagaaatgccatttgacccagcaatcccattactgggtatatacccaaaggattacaaatcattctactataaagacacatgcacggccaggcgcggtggctcatgcctataatcccagcactttgggaggccgaagcaggtggatcacgaggtcagcagattgaaaccattctggccaaaatggtgaaaccccatctctactaaaaatacaaacattagctaggtgtggtggtgcacacatgtagtcccagctactacgtaggctgaggcagaactgcttgaacctgggaggcggaggcagaggttgcagcaaaccaatattgcgccactgcgctccagcctgggcaacagagccagactccgtctcaaaaaaaaaaaaaaaaaaagaatttatgtactttgtagggacatggatgaagctggaaaccatcattctcagcaaactaactaacacaggaacagaaaaccaaacaccacatgttctcactcataagtgagagctgaacaatgagaatacatggacacagggaggggaacatcacacactggggcctgtcgggggcgggtggggggcaaggggagggagagcattaggacaaatacctaatgcctgcagggcttaaaacctagatgacgggttgacaggtgcagcaaacaccatggcacatgtatatctatgttacaaacctgcacgttcagcacatgtatcccagaacttaaaaaaaaaaaggagaaaaaaagaaaatacaaacttaacgctagagtaaaaagtaataccaattcttagtaacttcaaaaaaaattttaactatatgaataatagcttcataataaattaactactcccttaacacaattattaatgcaaatttgcttagtggattaaaaaacatctgtgtcatatctgccatcctctcaaacaacatctaccttctctaaaacctcaatttgatctgagccatcccaactctcaactactcctccacactgcctgagatgaaaaacggctgggattgaatgactgccaaaatatattaaaccaatctaactgcagggtaacggagtggatttctgcctgaggtagtttaagttggttcacatatctacaaacactattgcaaacacccttcccaattattatatacacactgagactggcaccccatgatactgcatatgctgaattcctagaaaaataaacctcaagtagaaaatattcctaaaatattcacttttgtttaaaaggaaattacttatctgtcctggtaaaaagacataaaatgacaaatatacaataaacattaaaattaacagtgttaggttaaaaaatcattatccatgatttatttttaagtacatctatgtttttgctagattagagttaacataattaaatggaactttaagcaattattacagttcatctccatgaggtatttgtgggtttttttgctttttgtttttttagatggagtctcgctctgtcacccaggctggagtgcagcagcgtgatcttgactcactgccacctctgcctcccaggttcaagtgatgctcctgcctcagcctcccaagtagctgggattacaggcgcatgccaccaagcctggctgatttttgtattttcagtagagacagggtttcaccatgttggtcaggctggtcttgaactcctgaccacctgatccacccgcctcggcctcccaaagtgctgggattacaggcgtgagccactgcgccaggcctaactccatgtagtattaacttttcttctcttctgattcttgtaccaactgcatcttttcttttaattccttctgatctttggcatactgttcaaatactggttgaaaaatatatactcctccagcaattccaaggacagtggcaaaaagcagttgtgcaaaagtcaatctcctaaacattgctgcaacaaatacagctcaaggaaaagctggttttggaaagtcacactccacacccaggaaatctcttcaaatctgcatacaaaaatggaaagcaaagccatcacttagtacaatgtccttttaaaagatgttatgtcactactttgcactggagtgaacaatatttttataatatgttactaattaaaacaagaatataaatacataaggagtacaggaagtgaattagggaagggtataagacaaaactaaaaccttttctattacagaatgttctcaatggttttaaatgcatactttttctttttttttttttttttgagacggagtctcgctctgtcgcccaggctggagtgcaatggcgcaatctcggctcactgcaagctccgcctcctcggttaacgccattctcctacctcagcctcccgagaagctgggactacaggcgcgtgtcaccacacccggctaattttttgtattttttgtagagacggggtttcaccgtgttagccaggatggtctcgatcctctgacctcctgatccgcccgtcttggcctcccaaagtactgggaatacaggcgtgagccaccgcgcccggcctggttttacttttaacaagaggagtgggccgcacgcggtggctcacgcctgtaatcccaacactttgggaggccgaggcgggcggatcacgaggtcaggagttccagaccagccaggccaatatggtgaaaccccgtctctacaaaaaaacacaaaaattggccaggcgtggtggcgcgcctgtagtcccagctacttgggagctgaggcaggaaaatcactggaacccgggaggcagaagttgcagtgagcccagattgcgccactgcactccagcctggactacaagagcgaaactccgtctcaaaaaaaaaaacaaaaacaaaaacaaaaaaaaaacctaacaacagcaacaacaacaaaaaaaataggaaccattcggcctgtttccacatctgtacaacaagctaaatcatccctaccctgcctacctcgttgaacaggcattttttgtgagagcaacgaacctgaaatgttaacaccaacactgacgtctacaattaccgttaccgtttttaataaccactcaggtacctccgactgttctgcgcctgctccacgtcactaaactcgctaccgcctgctcccctccagagaccgggggccttccagcagttttcggacccccgagcacagagaccgccaagccaaaggcgagtagcaatccctcggttcggaaacggcgaaaggaaaccgcaaggaggccaccacgtcgggtgggagctacgaagttgcccgttcccggttacttccgggcttgcgagcgacgactgctctcaaaggccaaacttaatggatggacgagcagcgcgctactgcagctttcttccgccttaggaaggtggcggccagggatgaggaggcccctaagcaagtgcggaatggagccggggggcggagatgccagcctcactttgcatggtctccagaaccgctcccacggcaagataaagctgcgaaagagaaagtctaccttgtacttcaacacccaggagaagagcgccaggcgccgcgggggtgagtgaggggacactgtctggagagctcctacccccatctaaaaggaaccccctccatttcattaccagccagttgcccgttgagctctgtgttgccagatcttgagttttgaaatgctgggaaatgctggaaacacagattttaatataaattctgatttttaaatgttggcaactaaattcaattttttaaaaaatactctgtatttggccgacaggctgtccatttgtggtcaagagcaggactttggagacatcacacagacccgggtttgaatcctgataagtaatttacaactttatttggacaaggcagtttaatttctgggcctcaatttgctcgtctgtaaaatggggctaataatacctatcccataatattgtttggaggattaagtgagatgcatgtgaagaaattaacacagtgcctggcatatataatagtaatcatcaatatatatgtacagaggaccattttatattgcacatatacaaagggctgcttcccaaattagtaatttgttagctggtttctttcattagatacacacatagtatgacctaattaattagcctaaggccttagttaacccactcttttttttttgtatttattttaatattatctttacacaataagttgcaagaaaagttggttaaactaaaagagtggcagtcacccagtgatgacgctgtggtgcttgtataaccaaccaagttggctttaagaatggtgtggagggaccagaggtcactactgtgccttacaaggagccaaccagagcagcagattttaagttttgcaagtggaactgcctgacttttgtgccactattacctgttttgttctgtttttcagatcttcttggagaaaatatttatctgctcttgtttaccatagctttacgaatattaaactgctttttagtgcagacaagttttgttccagatgaatactggcagtctcttgaagtttcacatcacatggttttcaaatatcctttgtggtttcttttccagactatgagtgtgtattcatcttggaaattgtgctcagtttcttttagagtagtcccccttgctccctcgtcttcagtagatagtttccaaaatccctagtggatgcttgaaactgtagacagtaccaaactctatatatattgtttttatatatgtaaaaaatacacacacgcttatgataaagtttatacaaattaggtacagtaagagattaacagtattaaaatataacaagtataacacaatactataataaaagttatgtgaacttttatgtggtctctctcaaaatatcttcatattttcagacagtggttgactctgggcaactgaaacatggaaagagaaaccacagataaggggggactactatacatattttcagttttccgtattttccccaaataattttaactcatcaaagtataccattattttatacaaatatttctcctgtatctttcttttatgttaatatacttgacacagccgttagcatacattcccacagtacttagcacttggaggatacagagaaagtaaaaaacacattactgccttgaagaagttaagagtttagttggccaattgaatttttaatgcaaatatccagtataaaatgctgttttaagactgccacaaaataaaatattgttttataaatggaaatgaaaatagattttgccaggtgaagtggtgtgcacctgtagaggcaggaccacttgagcccaagtttgagaccagcctgggcaagagagtgagaccccatcttaaaaaaaaaaaaaacacggaaataggtttcaatattattggacatttactccttaatgttactaattatggttatttgacttgggaatggacagagagactgaggagttacacttatcccttaatctttgcaagcatttacaagattcttcatcttttagggaaagatagtgttcagttgctggtaagtttaaataaaagtaactaaatgatattggggccatggaatttgtttttaaaaggctactgttgctgaagtccagccatatctgggaagcccatgatactacagacatactgtgatgtgtaactctttagtttgtgctgaaatacaagactgagcatgaaaatatcctgctatgaggaatcctgttatgatgtgcagattttcaaaatgactatattatgtattatttggacattagaagtatacttctttcttttttttttttttttttttttttgggacggagtttgctcttgttgcctaggctggagtgcaatggcgtgatcttggctcaccacaacctccacctcccgggttcaagcgattctcctgcctcagcctcccgagtagctgggataacaggcatgcaccaccatgcccggctaattttgtatttttagtagagatggggtttctctgtgttggtcaggctggtctcgaactcccgacctgaggtgatctgcccgtgcggtggctcacacctgtaatcccagcactttgggaggccgaggcgggcggatcacctgaggttgggagttcgagaccagcctgaccaacacagagaaaccgcgtctctactaaaaatacaaaattagccgggtgtggtcgcgcatgcctgtaatctcagactttctggaggctgaggtaggagaatcacttgaacccaggaggtggaggttgcggtgagccgagatcacgccattgcattctagcctgggcaacaaaagcgaaactccttcccccatcccccgcaaaaaaagtatcacttgagagcaccgttgtattttgtgttttttaccttgtaagaagaccgtgtgatatgattttatgaagtctgtatacatctaaacccactgaggatttagtgttgaaattaaaactttaaaatttttaatttgacaaacatttaatgatctgcataatcatcgtcctatatagtaattaggcatcaacagtaagtaggattgtaattcctaggctattaattgctggggtcagttgccaggagatagtacaagggcaggactaatggtgtaaaagtttctctagcctcactcccatgatcttttaagctgtcatcagatgagactcagagtttgtgctccccccgatttctgtcagtgggggttaatggctcagcattccaaaggcagtccaaatcctgacgtgttttgtgtagcttagaaagacacaggttctagggtatttgttttaaggtggggttgtactctccccattgcaatatttgcttccgttattgagaaattagggttaaaccagtgaaaccgatgcttcaaatgggaagatgatggggaaggagaattcagagcagtagcagagtttcttccattaacaacaggcagaatttaggagccgcaacctggcttttcttctcttacagttatctactagtttatagattatgcaaggtatccataaagtctggaatcacaagaaaatatacataatctcatcaatgacagtttatatcccaggaagtaggtcagattacaaatgaagaggtcttcaagatagaaaaatttcctgctcctccaagacctatccactgccctccatctgtagctgacccaccaggtcattttgtgatgtgaaggaagcctcccctgacctgctccaacccctctaaaaggaactcattgtcgtatctagaacttgaccctgtagagattcattaggatatgatcagtcattcatactctcatattgattattttaagcaaattatatacataattttgaagctagaagaggttggagaagtgaagtaaatagaccaaggtcacaacgtgttaaaagcagaactagagctaaatcccaggtctatttactcacagcctagtgctcttcccagatggctcctctacaaactgcataaggcttatgcacagctaggcatggtggctcacagttgtaatctcagcactttgggaggctgaggtgggaggattgcttgaggccaggagtttgagaacagcctgggcaacatagcaaaactctgtttctacaaaaaatttttaaaaaggatagatggcttagagctgcactgtccaccatggtagccactagctacatgtagctgttgaagacttcaaatgtggctagtccaatttgagaagtgctgaaaatgtaaaatacatactgaatgtcaaaggcctagtacaaaaaaagaataaaaatatttttataatttttattgattaaatgttcaaatgatgatgccttagatatattgggttagacaagatgaaattaattttacctgttttggatttgggggtcatctctgttgttactttttaatttgccagctatagaatttaaaattccacatgtggctcatgttatatgtcttttggcctgtgatggcatggaacatgtaaaaagaaagaggaagaggaggggaaacctgaatggggaaccacagtaaggtttgttgggttttgtttcttttgaaatggaatctcactctgtcgcccaggctggagtgcagtggcaccatcttggctggctgtaactgccgcctcccgggttcaagtgattctcctgcctcagcctcccgagtagctgggattacaggtgtctgccaccacacctggctaatttttgtatttttagtagagacggggtttcaccgtggccaggctggactcaaatgatctgcctgcctctacctcccaaagtgttgagattacaggggtgagccaccaagcttgccaacagtagggtctttgaatagtcagaagacaacaaaagggtatttggctcctgtagcttaggggaggagtcaggagtgtaaagaacagaagtatggaatgaggagctaccaacataggcctagtgctcaagttacgcctggcatgttcttctctttacctcactccactgctttattttactctttagcaggtccttactgtaacatggaaaattatggcatcaaaaatctggagaaactgctaatgactgggagttcagaactccgcttattgttatgcgaaagtctactttgttttaaattcaagatttctacttaaccacccttgaaaaacttctctttattcggggtaaatgtctctagctcttaacctcataatcatagatagtatcctctagacactttgtaatttattaatatccgtcttaaaatgtggatctccaaactgacacaataatgaaggcagagtaactagttcagaatatggtgggtccattaacttacatttctcagagcacaggaattcttttagctttttaatagctacctcacactgttggctcatattaagtttgtagccaaattgacttttcatatgaactgctttcagggggcctgggaagtaaggatgaagcttatagctccctatgcagagtaaacagaaggtatgtacatgagtgccttttcctgtattttacagggcacagtttatgtgaaattaagtactgggtacctttaactttccaattttagcatttatttacacattgtggacaaaaagaaaataaagtgctaaaagccactgacaactaaaagtaaagcagctcctataatgtggacttaatgaagtttgcttcaacaaaaatatgaattaacagccggcgcggtggatcacgcctgtaatcccagcactttgggagggtgaggggggtggatcacctgaggtcaggagttcgagactagctggccaacatggtgaaaccccatctctactaaaaatagaaaaattatacaggcatggtggcgggcacctgtaatcccagctacttgggaggctaaggcaggagaatcgcttgaacttgggaggtggaggttgccatgagccaagatcgcaccactgcactccagcctggatgacagagtgagactctgtctcacacacacacacacaaaataaaaaaataaataaactcacgtataaatttttagaaacacatcttttaaacaaaccaagattaaattgtgctctaccagcagttgttattttgttagtgttaactatgacacctttttttttaactctgagagatgctagtgcatagcattagcatttctaactataatttagttgtaatacatttagtctttatttcagttttacacttaaatttactctttaatgtcatctgaataccatgttcctataattgcagaatatttgtgcttttttaaaaagtaatttgttagccaggtgcggtggctcatgcctgtaatcctagcactttgggaggctgaggcgggcagatcacaaggtcacgagatcaagaccatcctggctaaaatggtgaaacctcgtctctactaaaaatacaaaaaattagccaggcgtggtggcatgcatctgtagtcccagctactcacaaggctgaggcaggagaatcgcttgaacctgggaggcagaggtggcggtgagccaagatcacacagctgcactccagcttgggcgacagagcaagactccatctcgctgggcacggttgctcactcctgtaatcctagcacgttgggaggccgaggcaggcggattgcctgagttcaggagttcgagaccagcctgggcaacatggtgaaaccccatctctactaaaatacaaaaaattagctgggcgtggcggcgtgcacctgtagtcccagctactcaggaggctgaggcaggagaattgctggaatctgggaggtggagcttgcagtgagccgtgatcgtgccactgcactccaccctgggcaacagagcgagactctgtctccaaaaaaaaaaagactccgtctcaaaaaaaaaaaaagtatttcttattatcttattttatatcttattatcttatacataatattatcttattatctatattgcaggatagagaagcagcataacttagtaattaaagtcaggcagacctgggtttataatgccggctttcatacttactagctgtgcagccttggaaaattagttaacctctctgtgcctcagtttcctcatctataaaacagttcttgactcagaagattgttaggactgaatgagttgatacatataaaatagcatgatacatagtacacagtgctgcaaatatttgaatttttaaaaacctgttgttgctaatgaatataaatatacttttaaaatagaaacttggccgagcacggtggcttacacctgtaatcccagcactttgggaggccgaggcgggtggatcacgaggtcaggagatcgagaccatgctggctaacattgtgaaaccccgtctctactaaaaatacaaaaaaattagccgggcgtgggaggctgaggcaggagaatggcgtgaacccgggaggcggagcttgcagtgagccgcggttgcgccactggactccagcctgggcgacagagcgatacgtctcataaaaataaataaataaaacagaaacttaacacaattaaatgactggctattaatatttacattaaaattagggccaggcacagtggctcacgcttgtaatcccaacactttgggaggccaaggtggaagtatcatttgaggcaagattagctgagtgtggcagtgcatgtctgaagtcctagctactcagtagactgaggcaggaaaattgcttcactcctggattcaaggctgcagcctgggtaacagagtgagaccctgtcaatcaatcaatataataaaaaataatttaaaaatatatttataatatatgtgtgtgtatatatgtcatatatatgcacacatacagagaatgagactggtaaatatcatatttatatataaatatatatatttatatttataatatattttatatataacatatgtgtatatatgtcatatatacacacacatacagagaatgagactggtaaaacttaaaactacattgattattttaatgagaatataatttttgtagaaaaggggatgtagggatgtagttttgtggaagaatagaaaaatatattgcctatttttgtactaagaatggcttcccatagatagttggatcagcttgttgacttttatcataattcagtttgaaccaacagatatttttaacatcctgttcttctttttaactgatgaagatttggattcctagacttgcccaagcacttctgtctgctgtagcagatgtgagactttactcattaatgaagcaactagaaaatcaggaagtggcaagatgggtggtaagtcctaaatactttagaagctgtatgccagttatttcgttcctatgggtataaagcacatggaaacattgattcccaaaacaattttagaagataattcatacaactttatagaggtacttccataaataagaacagtaatatgcaagtggcacctgccatatctttccttcggattaagccctgcacagtgtaagccactgatgccctcaaaccctatgagagtctaaaccctgggagacaacctttggaagccccttcactcctcaaaactgtccttgcctctctttccatagaattgagtagggatcgttctaaattaccagctacctcacaaagcatcttagctatttacaacccttgttctgttcctctagccagcctctatctgaggtgcagcccgagaaatctttttgcactgaaactctcacttctgaatgggatgttggaagtattaggttggtgcaaaagtaattgtcgtttgtgccacaacaatattaggttggtgcaattactggactcatgtaaggaagaaagtatagtatgcaagactatcttttgtcgtttgacttatttcaaggtgggaagatagattcctgacatctcccactccaatcttgaatggatttttcccatttaaacaataccctgatgagggattggattctgtagtactgtcgttaattcacttggctctttgtaaagttaataagcttatatgagcctgtttgaaagtcttaactaccttttttatattgtttctattggaaaatacattctaaattccaagtaaccaatttagcaacatatttctgaaatataatttattaataaattagaaagggaacatttctgcaggtattctattcctttgcattaaaaagaaagattggtttagcaactaagtccttgctaattgattcagcaatatggttagcctcattattttgtgcttatactttatgtacattgcagaaggctcaacataaaatggtaggcaaaagtcatgatggctttgaagtccttcctccaaagatacagcactagggccgggcatggtggctcacccctataatcccagcactttgggaggctgaggtgggcggatcacaaggtccggagttcgagaccagcctggccaacacggtgaaaccctgtctctactaaaaatacaaaaattatccaggcgtggtggcagacacctgtaatcccagctactcgggaggctaaggcaggagaattgcttgaacccaggaggcagagattgtgccactgcactctaacctgggtgacagagcaagagcaagactccttctcgaagaaaaaaaaaggatacagcactaggttcttctagtttagggaaaacctttactttcatgaaaattgggaacattttttaaaggctatatttggtgagatgggaagctagtgccacatgcttaacaattgcctcaactaacaagtttcttttaacacatttgttttgtagacttaatggtgctctgtgtgcatgttcttccaaaaactgattcattaatttagtcaatctccaaattaaaatttaataatgtctcctgacttttttttcctctttcctcttttgtcttaatttttcatcagcgttccaaaacagggagacattccaaacaagtgcaacattccaaacaaggtcaacaaaaaaacagtcataatacttgtgtcagtactataagacagtttgagaaatattgattggaagaatctagttatgaatttcaatcatctgtaaactctaccatcaaagaatctgttttttatgtgtttcattaatggaaagtgggattttaaatcaaatgaagtgccataaaaatgcacctgaaagtataaacttcttaacatgaacaaatatagatctgctattatcataaacctgtgtttcatgtaactttctaaaaacgacgtttgggcatgcctacttactttaacatcatctaccttttgatgtccttttcacaatatttagacttgcttgctatttagaagataatatgtactaaggttttccatttccaatttcatatatgtttgctctgtactttttcttagtttttttgccagttgtgctcctggttcacatggtattgctgtaccagaacccttacaaacaccatggaaactgttctcactataattgctcttttctactatcctttggaaggttcaaagtctatgaacaggtaagaaaaattattgttaataattatgttcaaaattctacttttgaaaaatcttaaatatcaacatattgtaatgtctagtagaccccctaattttcatgagtcatgagaaccacaaattttcagttgatatattatagcagaaaacagataatactcaaacaggataattaaggagagtttaacaaaaggaatatttgcaaaggtttagacaatatttagaaaagccaataaggaaacaccatagtacccccagcatggttatagtaggaagtctgtattatctctaggccccaaggagcaaggagaagaaatggttactggaatctataaaaagctgtaattgtaagagagtgccccagcagggacaggcacagccagcctttagcaataatgaggagacagccagggaactaaataatcctgacccaactcttctgcctctcaacccaaaacagtcagaagccagaaagcaaggtagccactgatgctgtccattcaggtcagctttcctgcgtgcagactggataaaggctgaaggagaagagttttggaagggcaaataggaaatacttggactttatttggcttcctttaaactggggaaacaaataccacgcaatgggaacatgagtgaaggcacagaactgtaaatgggctccatttacagttacagttacagtatattcaaggcagattgtccagagtagttatagagtgttgtaggatgcatggaagaagataagaagaagggatgaggctggaatgagactttgaatttggattttattctgtaggtaatagggaaccatttgaggcgtttgagtagcatgacataatcaaatctgattttgaaaaacttcttttgtaatagcagtatttaggatatactgaaaggagaaaagccagaatttgggatctagttaaaattctagtatccattcttcctacacaaaaggttgttaggatgatcaaatcaaataagatcatttctgtcttagactctcttaactacaagaaaaagcattcactcaagttacgtatatgatgaggactttattttaaggctaaaagggaaaatgggcatctcaagccttgtggctaggactggaagaaaactgtagaatatctgagccacacaaatgaattgaaatgttatgcagaatccaaggcagttttggggaatggactgttttgttgtgcctttatatcccaaatagcctatgaatcctgccttagtcttccatcatttaggggcttagctagtctctccacttctgtttttgctagcaattacccagatttctccatatctcacgttcagcttgagagaatcgaattaggtccattaaatctcattgtctctatctggacataactttatttcacactggccagccttagattggctacctgggcccaggtgcccttccctaattcagtcaggaagcgcaagggtcacatggtacaaaaggactgctatataagcatttttccttgtataagcatgacagatactattccagacctgacaataaaatgacattttgcacactcctttaaaaaatgcaactattggccgggtgtggtggttcacgcctgtaatctccacactttgggaggccgagacgggtggatcacttgaggtcgggagttcgagaccagcctggccaacatggtgaaaccccgtctccactaaaaatacaaaattagctggatttggtggtgcatgcctataatcccagctactcgggaggatgagacaggagaatcacttgaacccaggaggcaggggttgcagtcagtcgaggtcacacgattgcactccagcctgggcaacaagagcaaaactgtctcaaaaaaaaaaaatttgtggagatggggtctctttaggttgcccagctggtgttcaactccgggatcaagtaatcctcccaccacggcctcttaaagcgttgggattacaggcatgagccaccaaacctggcctaaatttcaagctcatgtatcaaaatctggatttcaactttctcttgaaaaattggaagttctaatagtattttgggctaggattccttcatgacaataccatggttcaaacttagcctacatttctcatttttattttatttttttttttcgagacagtgtctctctctgtcgcccaggctggagtacagtggctccatctcggcccactgcaacctctgcctcctgggttcaagcaattctgcttcagcctcccgagtagctgggactacaggcgcgcaccaccacgcccagctaatttttgtatttttagtagagatggggtttcaccatgttggccaggctggtcttgaactcctgacctagtgatccagctgcctcggcctcccaaagtgctgggattacaggcgtgagtcactgcacccagccccatttctcatttttatagtttactgggtctctgtaagcatttgaatgtgttatccttgagcttacatcctcatcaacattacagaattcattcttttttttttttcttttttttgagatggagtttcattgttgttgcccaggctagagtgcaatggcatgatctcagctcattgcaacctccacttcccaggttcaagtgattctcctgcctcagcctcccaagtagctgggattacaggcacctgccaccacacccagctaatttttttctatctttagtagagacagggtttcaccattttggccagactggtcttgaactcctgacttcaggtgatccacccacctcggcctcccaaagtgctgggattgcaggcctgagccaccacacctggcctacagatttctttatagttatttttattagttaataggtatataatggtaatataggttgtcttattttgctttcttttaattttttacaggactaagtatttttccacataataatatactatccatagtcctcatgattaaattatcaaattgtctctttcaaccattagtttagagaagtcctgttaataaaaatctgtatttctatccatgatcatacagtttatacagtaggccttttatcagttgtatgcatatatatttcacttggctaaaattaactttcaaaacaaaattctaaatactctgagcccatcactgcctaaataatcctgtttctttaaatgctcatgctttttcttagagaaagcctctctttatgactttcttatagctccttaggagaaacttgatcatttttttttcaatcaagaaagtaattggcaaagttatgaggtaaaaagcatgctttttagcacacaagactggcattaagacatatgataacttcttatttgaaaatactagaattagaagatgagcactgaaaacggctttagatattaccttttttaaaagataagaaaaactaagacccagaaagcgtaagtaacctgcaaaagttaatatagctatttaggccaggcactgtggctcctgcctgtaatcccagcactttaggaggctgaggctggcggatcgcctgaggtcaggagtttgagaccagcctggccaacatggtaaaaccctgtctcccactaaaaatacaaaaaattagcctggcatggggattagcctgtaatcccagcactttaggaggctgaggtgggcagatcacctgacgtcaggagtttgaggccagcctggccaacaaggtgaaaccccatctctactgaaaatacaaaaaattagtcgggcatggtggtacacacctgtaatcccagctactcgggatgctgaggcaggagaatcacttgcacctgggaggcagaagttgccgtgagccaagatcatgccactgcactccagcctgggtgacagagtgagactctgtctcaaaaaaaacaaaacaaaacaaaaaaaagttcatatagctatttataccaaaaggaaaatgtcaaatcacagtgtaaatgatagataacttcaagttaatttcccacttgtcttatcacacattttcctcttatagtgtcaaatactcatccctggtggcacttgccttcataattcgtcccacagctgtcattctgtggacacctttgctcttcagacatttctgtcaagaaccaagaaagcttgatcttattctacatcattttttacctgtagggtaagtgtggcaataatccatccatttattttagtagcctacaaatcacagattacgaacaagattttacatctttcagttaattattttatcttctaatgtcaatgagaactcttagtccaaggaaatagaataatgcaaaacttatattttttatttatgatcctgattataactattttaatttgcttaactgagtgcttttgtaattatttctaacttagtgttttccaatgctttatttcctaaatatttctcacatatattttagagatacttgattcttttacatttgtataaggctttataattcataatgtgttttcacatattacctcataattttcataatacttcagtctaggcaatatatgtttttattttgtagtagagaaaacaggaggctcgcagaaatttaaaatgtattagtcaaagtcattgggctggttgctatactggtattgaaacccacatcttctaactacactatgagctcctaggatgagttgtatcccaagtatctagtagactaccccgaataattatttactgaagggatgactgcattctgactcttacaacagtaatctttttaatatacaatcatgcaccgcataatgacattttggttagcactggactgcatttatgacagtggtcccataagattatattaccgtattttagtgtactttagtttctctgtttggctatatatatttttttatttgagacggagtctcactctgtcacctaggctggagtgcagtggtgcattctcacttcactgcagcctccgcctcccaggttcaagtgattctcctgcctcagcctcccaaacagctgggattacaggcgcctgccaccacgcctggctaatttttttatttttagtcgagttggggtttcaccatgttggccagctagtctcaaactcctgacctcaggtgatccacccaccttggcctcccaaagtgctggaaatacaggcatgggccaccatgcccagcctgtttagctatagttagatacacagatacatagcattgtgttgcaattgcttacaatattcagcatactatcatgctgtataggtttgtagcctaggagcagtaggctataccatatagcctagatgtctgtaagctgtaccatctaggcttgtgtaagtgcactctatgatgtttgcacaatgatgaaactgcctaatgatgcagttctcagaatgtatccccattgttaagcaatgcatgactgtactagtattcactagtcacaagtatttttcgggtagcaatctgaaaaggactaaattatcttgcatctcagttgctactgttgtcatttctcagatgtattaataacattgcattaaatgtattcattcattcaggaattatttaatcctactatgtgccaggcagtgttccagatgtaggagatgcatcagtttaaccaaaaaaagtacctgccttcatgaagtttacattctagtagggagagacagacagctaaaaagataagagtaaatatatatttgtcaagtgatggtaatacagggaaaaataattgtgggataagaaggatagaatgccagtgcttggggtaatgggggagctgttatttttaaatagggtagttgggaaagatcaccatgataaggtgacactggagccaaaacttaaaggagttgagagagtgaaccatgtagttacttgatgagagagtattccaggcaaaggggccagccaagtactaagtatgctgggcatgttcaaggaacagcaaggagactgatgtggctaaaagagagtgagtttgggagaatgtaataatgaggtcagagagatagcaggggctcagttcctatcggctttaccactgagggagatagaaagcctttttaatctcatcagcagcatgataataacttattcatttaataagcatttaacctactttgtatccagcatttgataattcagaagtgagtaagatacagtgtctgctctcaaagtcaaagtctgtgggggaaaaagatataacaatacagatgctccttgactcagggttacatcttgataaactcattgcaggttgaaaatatcataagtcaggcaaggcacagtggctcacacctgtaatcccagtgccctgggagaccaggagttcaagaacaacctgagcaacataatgagaccccatctcaacaaaaaaatttaaaaattggccaagtataggtggcactaggcacgcctgtggtcctagctacttgggaggatgaggcaggaggatcccttcaacccaggagttcaaggttgcagtgagctatgatcattccactgcactccagcctgggaaacagagtgataacctgtctctaaacaaaataaataacaaagaaaatattctacgtcaaaaatgcacttaacacatctaacgtactgaacatcacagcttagcctaccataaacgtgctcagaacgcttacattagcctacagttgagcaaaatcatctaacacaaagcctatttcataataaaatatttgaatatctcatgtaattcattgaatactgtactgaaagtgaaaaacagaatggctgtatgggtaccattttaaagttgaaaaatcgtaggttgaatcatcatcagttagggattgtaattcttacccagtgatttaaagtgttctagtggttgggcacgatggctcacgcctataatcccagcactttgggaggctgaggcaggcacatcacctgaggtcaggagttcaagaccagcctggccaatatgatgaaaccctgtctctgctaaaaatacaaaaaaattagctgggcattgtggcacatgcctataatcccagctacttgggaggctgaggcaggagaaacgattgaaccccagaggtagacgttgcaatgaactgaaattgcaccactgcactccagcctgggcaacagagtgaggctccatctcaaaaataaaaccttacatccagattatatataaaacttttaaaaatctataagaaaaagataactcatagaaaaattattgaaaaggtttcatcaggtacttcaaaaaatattaaaatggccaataaatataaagagactcatttcatttgttatcaaggaaaaacaaagtaaagccaccatgaaatactactatactatacatccacccaaatggctaaaatgatgtggaacttatatattcctgtgggactgcaaactaatacactattttggaaaacttttaagtacttacaaaagctaaataaatacatagttgcacttacaacttagggcaggggtcaccagtcccaaggctgtggactggccccagtccatggcctcttaggaactgggctgcacagcaggaggtgagcaagcaagcaagcattactgcctgagctccacctcctgtcacattcttacagaagtgtgaaccctactgtgaactgcacatgcaagggatctaggttgtgctccgtatgagcatctaatgtccagtgatctgaggtggaacagtttcatccagaaaccatgccccactcccacccccgcaacctgtttgtgggaaaactgtctttcaagaaaccagaccctggtgccaaaaaggttagggaccgctaccttagggcccaccaattccaatcctaggtatatgtctaacagaaatgcacatatatggataccaaaagatgtgtaaaagaatgttcattgcagcactattcacaatagctggaaatggaagcacagtgtccatcaatagaaggaatacatacagtgtggtatacatagttacaatacacagtattgtaaaggaatgaactacagcacgcaaaaaaacttggttcaatctcacaagcacaatgactaaaggaatttagacatgagtacatatggtatgatcctattcttataaaattcaaaaaaagataaaactcatctatgttatcagaaattaggatagtggttacctttgggaagaggaagggttacctttgggttacttttggggaggaggtagggactgactgattggagggacaaggtggtgctgctaatactctttatcctgctctgtatggcaggtacacagttgtgttcatgtagtgatgattcatagagctttaccttcatagcgtatttttctgtatatgtgtttgttggaggcagtctctgagatggcctccagtgatcccatcctcctgctatttatgtctttgtataatcccctcccccttgaacatgggctagatttgtcgactcaattctaatgagtagaatacagcagaagggatgggatatcacttacaagactgggttatgaaaagactatggtggccaggcacagtggcttatatctgtaatcccagcattttgggaggccaatggggaagtactgcttgaggcccggagtttgagaccagttgggtaatatagtgagaccccatctctacagaaaatccaaaaattatccagtcatggcggcacacacctgtagtcctagttacttggaaggctgaggtgggaggatcacttgagcccaggaggtcaaggctgcagtgagccatgatcacacactactgcactccagcctgggtgacagagcaagaccctgtctctaaaaaaaagaaaagaatacataaataaaaagattatggcttccatcttgggtgcctgtctcactcactcttggctgacttaccctgggttaagccagttaattatgtcatgaggcagctttaaggaaacggccatatgttgaggaacttagccccaccagcaaccatgtgagcaaatttggaagctgatctctccacctgtaattgaaccttcagatgaaactgtagcccctgctaagagcttgactacaattcatgagcgacctcgagccagaggcacccagctaagcaacacctaggttcttgatccacaggaactatgaaatggtaaatattcatagtttaagttaacaagttttggggtaatttgttatacagcagtagtctttcaataatctttttattaatatattttttacaatattaatcgattatataatcttatctactgatctttttcagtagatacctttcaaaatgtgtaaatctatattcagttggtgaaactgtaaagcatttttatagtggcttttgatgcaaggcacgtacaaagccatatgctaatagtggattttcagcaagctccaaatgtgaatcactatgctatttttgtttttcagctttgttactttgagtttgtctctgatgattgatcgtattttttttggccaagtaagtaaaagtatattaagctaacagctatttttatttttaatccattaatactttagaacagaggcaaatgattttttaaatgatatgggatacattacaaaagacttctaggcatatcctaataagcctttggttcaatttgttgtgctttctacataaaagaattagtactcctagctaatattcaggagagtacattttaaggcagggaattattaagtgagcactgaatgttacctgttgctgtttctgtcattattgtcagctttacgctgtaattcaaattgtaatgttttcaaagctttatcttcacaggtaatatgtcacattgtaaagtaccacacagtccgaaaaatatgtctactatcctctttatctcttaactggatataaaacttggatggagctggaggccattattctaagtgaaataactcaggaatggaaagccaaatatcatatgttcttacttataagtgggagctaagctatgggatgcaaagacataagaatgatataatggactctggtgactcagggtggggaagggtgagagaggggtgagaaattcttatttcgagtacatattgggtacagtgtacattgcttgggtgatgggtggaccaaaatcctagaaatcacctctaaagaacttattcatgtaaccagaagccatctgtaccccaaaaacttgaaataaaaacacaaacttagactgccaaaatataagtttgattctcactttgaatctcaaaaatctagttttacaaattaacaaggaacacattaatacttaaagaagaaaaaataacagttaagaaggatttcatacagtcattaattaaaattattaggccaggcatggtggctcacacctataatcgcagcactttgggaggccgaggcaggcagatcacgaggtcaggagattgagaccatcctggctaacatggtgaaaccccgtctctactaaaaatagaaaaaattagccgggcgtggtagcgggcgcctgtagtcccagctactcgggaggctgaggcaggagaatggcgtgaacccgcgaggcggagcttgcagtgagccgagatcgcgccactgcactccagcctgggcgacagagcaagactccatcttaaaaaaaaaaaaaaaaaaaaattattaatgtaaactattgcctggtttttagacttcaattctgatttaatgtcaaaattgtatcaatcccctaatgccaaagattactacttggcactaacacatttctatttatttttccttcaacggtgccagtggactctggttcaatttaattttttgaaatttaacgtgctgcagaactggggaacattttatggttctcatccatggcactggtacttcagtcaaggatttccagttatcttgggtactcacttacccttctttattcatggctgctatctagcaccaaagagataccggatacttttggtgactgtgctgtggacactgcttgtttataggtaagattttatttgttcaaaaggctaaaattttttatgttaccaagaaatcaaattaaattcttcaaaaagtaaactttatgttttggaggtgccattaacttttgttagtgggaattatcttagaagatacaagtagtagtaattatggaggcactagagtgaatactttagatatgtagtttgcttaataaggattacactcaatttttaagaacttggactaattttatttgctttaaaaaaaaaaaaaacagaccaggcacagttgctcatgcctgtaatttcaatactttgaaggccaaggtgggaggattgcttgaagcaaggagttcatgaccagcctgagcaacatagcaagaccctctctctgaaaaaaaatttaaaattaccagggcatgatggcatgtgcctgtagtcctagctattggggaagctgaggcagaaggactgcttgagcccaggaatttaaggttgcagtgagctatgattgtgctactgcactccagtctgggtgacaaaacaagaccctgtctcagtcaatcagtcaatcaatactaccaaaattttaaattgaaggaccacagaaatacattctaaaataaaaatgtatgtatccttattccaaatttgactaatttcacttacttggattgaaatagaaatcccgtttttagaatgtaactgtactttgtaatttcaaattgacatcatattttatgattagttttaccatatcataatcaccttataactaaaaaataagatgaatttctgaagcaagaaattcagtctgaatacttagaaaataaatagatcaagttaaatatattttatattaaatatattactttctcaatctatcatataacatgataattaatattttttaataatatttgtttttattacagcatgttgagccacaaagaattcaggtttatttatccagttttaccattctgtatggtgttctgtggtaagtgcttttgtttgttatagaaaataaattatatagaaatagtctaaagacaacacatcctcattaaactatgtctattttcaactaggttaataaggaattacttaattacagattaattatattactgcaatattccctttttgtagtccaaatatcttttttcctatatcctctaaagtgagataaaaacataaagatcctagcccagtgcagtggtgtgcacttttaatcccagctactcagaagcctgaggcaggaggatcacctgagcccaggagtttgagaccagcctaccatatggcaagtccttctctcaaaaaacagacaaacaaaaaacccacataaatatccaatacccaaagcagtttttggtggtggtgtttctatttggtggtggtgtttctcactaaaaagtaaagtaacatgtctgtttttagattagctattttaagtttatggttaaactgtaagggtcttcattttcacaaaggaaaaatgtatttactgctgttgaaactagtttttaatgcttttacacacaaaacatttacacttttaaaactcactctaaggcatatgcaattattattattatctttttagacagagtctcactctgctgcccaggctggagtgcagtggcacgatcttggctcactgcaacctccacctccctgtgttcaagcaattctcctgcctcagcctcccgagtagctgggattacaggcatccgccaccatacccggctaatttttgtattttaagtagagacagggtttcaccgtgttggccaggctggtctcgaactcctgacctcaggtgatccacccgcctcagcctcccaaaagtgctgggattgcaggcgtgagccaccgcgcccagcctggcatatgccattttttaagtaattaactcctgattttattcaggccttttctccatttttccacagtcttaacatgtatttttttgtcacttacaaaaatccttacatgactcaattcaggaaaatctgggtttttacattggttggtttggaaaaattacgaattgaaactttattaacttcaagtttaattcggaataaatgactgttgacttccttcaaatattaagaccttaaaaaaaatcacagcgttgagagagaagaaatgactagccaactggaactggaggctggaaaaaacctagggagttacagttttcaaacttattttttacttaaaaaaaaagaaaaacattgagttaggcaatgtttgaccaagtatacatcaactcctacagatctgagatgtataatctcttcaatttaagaagataaacatacaaatataaaatcaaatattaaaaatctgtatttttgatacatctgaagttctgaaatcaaagcctcagtctgtcattactttacagtgtaaccacatacaaacgcaggcacatacaaaaatttagacatctaacagctatttggcaagccttaagaatagctggccccatttgtcagaggaaatctgttcataaatcactattcagatgttaaatggtttctgttctgttgggtttttttacagccacttgagtgtgtattataattaaatcaagcattggcagagtacaaaggcaaatgtttttgtgtgcctggaggggacggggaggttggttagtaacttggtttgatttctgttttcataaaccagatttttccagcattcctcttctgtgtcctgttgctttaccaagtatttacacaaagattgagttgtctgaatcctcattgccagtctaaaagattgaatctttaagtggcaagatccctgtaaccagggcctattcacagtttattgagataaaatgctgatgaggggtaaagagagccccttctaataggtaagaatcaccccttcttccatcctctgtctacttagaaggatccctaaaagacagcaacctagaaaaccccttgatctcctcacaggatgcattcttttcctccacaccctacctaaggttctagagtgggtcaaaaaactctaattcctaggagatttgtacttccactaacagtcagggctgtttaatgccaagaggttccaacagtaggatcagttctgtctagtgatgtcacctagacagaaatctctggacatttagaacagttctctttggagctcttgatgttttagtgacccagtttgaatctttcctaactacttgaaatcttgagttataccacaaatttcagccttattctgctttgtgtgacttgttttaacctatttttatgtaaacatgacaactctgtcagccattgctgtgtaaaaggccacctcaaaactgtagtggcttaaaactccatttattataatttacaggtctacatttcaactgggcagttctcatctccactgagctcacttacacagctgcagattgggtagatagctctattgacctaggctgggctctcatgtctggggttcaactagctgtaggccaagtcttctcagctcttctgagttttctcttcctccaacaggccagctagggcttgttcacttggcataggccgggttccaagagagggagcaaatatgcaaggccctttgagacaagggcttggaatttgcatactgtcacttccaccacattcttttcatgaaagcaagtcactgggccaggccagattcaagaggtggggaaataaatgccaacctcatagtgggatgggacacaggaagaaaaataattgcagcagttttttcagtctacggtaacttctcttgcctaatttgaatttcccttagtcctataaaataggactcaactctagaaaatatattttgtgactggctctgatctttagtgaattgttcaacaatgtgcctcattttccttatctgtaaaagaaaggtgatattttagcaacactaattaaattcttagtttgaatctctcatttgtgctgacagagttcagcacccactactgattctgagttgagtgtctgcttatctgtttttaccacagtggctaatatagacttctctcttactgggccactttgtttttccatattcttatctttttttttttttttttttttttgagacagagtctctctctgtcgcccatgctggagtgcagtggcgcaatctcagctcactacaacctccgcctcctgggttcaagagattctcctgcctcagcctccagagtagctggaattacaggcccatgccaccacagccagctaatttttgtatttttagttggggcttgaccatgttgaccaggctggtgtcgaactcctgacctcagatgatccacctgccttggcctcccaaagtgctgggattacggcatgaggcaccacagctggccccatattctaatctttttatcaaaattgcatatgtacattatttcagaagacattccacaaggaattaaaaaaaaaaattgttcccctgctctccctatttcctctccccaaaaacaatcagttaagcattctttcagctggttattttggtatttatctcgatatctctaaaacatttataatgccacttaaaggtctttgttttaggcattaactgttgaattctatcgaagatggaaagatggctttacttccttaacaaaatagcaacataaaattcttcctggccagctgccagtggctgacgcctgtaatcctagcactttgggaggctgaggtgggtggatcacctgaggtcaggagttcaagaccagcctggccaacagggtgaaaccctgtctctactaaaaatacaaaaattagctgggtgtggtggcacgcacctgtaatgccagctacttgggaggctgagacaggagaatcacttgaaccctggaggtggaggttgcattgagccgagatcggcaccactgcactccagcctgggtgacagagcgagattctgtctaaaaaaaaaaaattcttcttgataccttcatctgtgcccagtaccctcattatggttagtagttcaaagtctctctttcccagccccattctactgtatgtcccattccagaattgaaccaccttttgttgttcttatctaaacactgaaactaagctttctcaaagagtatttaaaaatagaaacagtaactcagatatctctctaattggtaaaatgtggtagggattttttttcttaacattaggtttcctgataattcttgtcaaaaccaggatggaatcagcaatgtacagtctcagatactcccatcctctctattaccgtgaaccttaccttggtaagaaggaacgtattagtgattgctggaaaatacagaatgccacgctagatatccaaaatttttaaagtgtgtatatcaagctaaataatacatgatgattaagagatatggctttataaaggaaccacctcatgaagtatcttcttatatgctcaggtttttagattttatcctgaagagtagtcaactgagatgtaatggattttaaacatttctgtaacagtagtctgatgaacatgatctgataggagcccagtgtatttttttattataaaaataaatgccgatggtacaaaaatagtgtgtcatcctcaagtcatctagtcccattccccagaggtaactattgttatcactttcttaagcagttcttccagaaattttctgtataccgactttcaagtatctttttgtaggcccagataacaggagcaaattaagtatttaggggtgatgtttagcatccagttagcaatgggttgttactatgtgaaaggaaggaacctatactttagtcactggggtacacacacagtcttaaatcttcagtgattgggatacacatcatttacgtggtggggatgatcactttctgaagctaggtcatttgagggtggattatttcagtgagaactccatctccaaatttgtgcgtgccattaagtagacttactggatgtcacctactggaatcttgttcatttgttttaaatattgatgaaacaatactactggtctataagaaaaccatggaccttaggcttctcttgtggttcactcagtctagcattggaactggaaaatctttccaacccttcctttagcaactcatttctgaaatcccctttggaagctttcagtgccagaaggtttaaaaacccctcagaggccttaaattcaggactcttgacttatactctaaagttgggttcttttctaacatgtgcacaagtcatttgatgataactgaaattataaagatattttctttatatgtcaaatgcatagtaatgcttataggatgctaaacatgtaaataaaggcagttctggctgggcgctgtggctcacgcctgtaatcccagcactttgggaggctgtggcgggcagatcacctgagtttgagaccagcctggccaacatggtgaaaccccatctctacttaaaatacaaaaattagccgggcatggcggcaggcacctgtaatcccagctacccaggaggctaaggcaggagaatcgcttgtaacccaggaggtggaggttgcagtgagccggtatcatgccacttgcactcccgcctgggcgaaagagcgagagtccatctcaaaaaaataataatcataaagacagttctattttaaataaggttttatccccaaacttcatttttaagttggaacctgaaatatttttttcttagaaataatactgtgacatgtagtaaggctcccagaatattacacaaaagctcatcggatccataatactgttgaagacaattttgaatggcaactgtttcagtatccactgtccccaagaaaactaagctatcacctgactctccctggcattgttcagctgttccttctcttcccagcattttctttatattacttctctaagtaatatggagattcagttctcactaaaatgatccatcctaaaatgagctaagctcagagagttaaaatcaccatcatgtaaggcaagcattacctaacttaagagacgctctgtctcaccagtactgaagatgctggaaacacaagcatgttatcttccagcattctacccagagtgctattttcacagtcttgatcaccaagtattcccattttgtgtcacccacctatactattgtattcctagtgccatagtttcttttttttttttttttttttttttgagacgacatctcgctctgtcaccaggctggagtgcagtggcacgatctcagctcactgcaacctatgcctgccgggttcaagtgattctcctgcctcagcctgcctcagctgggactacaggcatgcgcctccacacctagctaatttttgtatttttagtagagatgggttttcacgatgttggccaggatggtctcgatctcttcacctcgcgatctgcccgccttggcctcccaaagtcctgggattacaggcgtgagccacagcccccggccttgaatgaacaaattattaataagtgaatcactttacacatgctcaccttgtaagtatcttcaaataattgagaacaaactgtatcttctcgggccttgctgtaggatgggcttgctgtagtttggacgtttgtcccctaaaccttagttgaaatttgatccccactgttggaggtggggcctaatgggagatgcttcgatcatgggggtggagccttcatgaatggcttggcaccatcctggagtagtaagtgagttctccttatattaggttccatgagagttcccccgagtgctggctgtacaaaagagcctggcaccttccactttcttgcttctgctctctcaccatgtgatctctgcacaaactgactccccttcaccttctgccatgagtggaagcagcctgaagccctcaccagtggatgcttcttgtacaacctgcaggaccatgagccaagtaaatataaattagccagtctcaggtattccagtatagcagtacaaacaaagacaaggctttaatgtagctttttgtatttgagcctactaaagtagatgttgttttagcctaccaacctaagttaagtgcttcaacttatatttggggatctgctgtgtctgtgattggggttattacagatggttgaacttttagaatcctattttttaatttattttgagacagtttcactctgttgcccaggctggagtgcagtggcgtgatctcggctcactgcaacctctgacaccacgcccggctaatttttatattttagtagagatggggtttcacctctgttggccaggctggtcttgaactcctgacctcaagtgatccgcctgccttgtcctcccaaagtactgggattacaggtgtgagctaccgcacctggccctattttattcatttttattttcgtagagacagggtgtcacccaggctggagtgcagtggcgtggtcatagctcactgtcccctcaaactcatgagcacaggtgaacctcctgcctcagccttcccagtagctggatctacaggtgcgcactatcacgcctggctaatttttttttattttaaatggagtctcactatgttgcccaggctggtcttgaactcctggcctcaagcaatcctctcatctcagctattttatttcaaataaagctagttctaattatcattccttttagtaggttcctcattttaccatttcaaacatcttataaatgtagatttaagtgataggcttagttttcttaatcttgctacatttttcaccacaccacttttcagattattctttaatcagaactatttcaagtagattaaaaaatactaggtgacatggacatgtgatattccaactcatgaggtatgaactgtggatgatattaacatattcataggaggaacaaaataaaaaacactgccttggtcccattcagtattgtactaacattttgggcaaaccaaggtttggatgaagaatacccaagttcaaaaagaactattatctagttctataaaaagagtgtatgtaaattatgaacaaaatgtcatgcttactaataagcttaatcttttccagtggaaaggcctgttctttgtattctcagtagatcctaatatgtccattaatagtggctgttgctgaagaaaaggactatcagaggggagagagacttttacttatccttttatacccgtctattcattctacttggttttttcctttggttttttgttttgttttgccccacagaataatccctttcataaatcaaaaaagaaaaattgttcagcatctccaaattgcctgactgtagtgggaaaacaaaatttcccactgttgtgggaaaaaaaatgtaagacatagcaccttttcttccactcatatacttacggaaaatctcccaggtgcccaatggcttattttcctaagaggacacattattgaaactcgtattacacactaaaataccaattattagtgcttgggagattaaagaggtaggtaaatggaataattaaaagtcctatttatttagcaactactatgtaccagggcagtcactggacattttttctaacacttgaataaggtactattatcccaatgaccagcaaagtaaaacgacttgtgctagaactggaattcaaatctggacctgttggactccataaccatcatctttccactatacctcaataccttttactagaaaaagtcaagacctagatgacagtagtgaatggtgaatggtcagagatatgacttattgcttatttcttatttgtctataacagtattacagtttttgctatttccattaaaaattacagatgtatttgcagttaacataacaaaagattgtcagtgttaaggttcaatatgtctatcttcatataggatactcattaacccacctgaaaacatggaagaaaccagctctaagtttcctgtttttatcaaatttgttcctcgccctttatactggtttagttcatcaacgaggtactcttgatgtcatgagtcatattcaaaaagtttgttacaacaatcccaataaatcttcagcttcaatatttataatgatgccttgccactctactccttattacaggtaataaaagatgttccactatatgctgttaagaaactgaaactgactactttaaaattccctttcagattcctggatttgaattaattggtcactgatcaaatgataaattttaaactcccacatatttattcactgatggattttaaaaaccacttgaactgtgtcaaagaaaatgttttaaataaactttttttcttttttttttttttttgagacggagtctgttctattgcccaggctggagtgcagtggcgcgatctcggctcactgcaagctccgcctcccaggttcacgccattctcctgcctcagcctcccgagtagctgggaccacaggtgcctgccaccatgcccggctaattttttctatttttagtagagatggggtttcaccgtgttagccagggtagtctcgatctcctgacctcgtgatctgcctgccctggcctcccaaagtgcggggattacaggtgtgagccaccgtgctcggccgtaaactttattattctttaaaaacaatttacttacacctaattctgatttaaatcagtataaaacaatttgtaggtatctgatagtcttcttagtaaagaaactcatgtattacttaccttactacaaatctctgtgatacatctttacacaatttgaattaatcttaaaacatggattttaggccgggcgccgtggctcacgcctgtaatcccagtactttgggaggccgaggcgggtggatcacaaggtcagaagatcgagaccatcctggctaagctgggtgaaaccccgtctctactaaaaatacaaagaattagccgggcgtggtggcaggtgcctgtagttccagctactcgggaggctgaggcaggagaatggcatgaacccaggaggcggagtttgcagtgagccgagattgcaccagtgcactccagcctgggcaacagagcaagactctgtctccaaaaaaaaaaaaaaaaaaaacatggattttagtccagatttactactggattattgccctcatcttaaactagacttctttttttttttttttagatggagttttgctcttgttgcccaggctggagtgcaatggcgtgatcttggctcactacaacctctgcctcccgggttcaagcgattctcctgcctcagcctcctgagtagctaagattacaggaatgtgccaccatgcccggctaattttgtatttttattggagacagggtttctccatgttggtcaggctgatctcgaactcccgacctcaggtgatccgcccacctcagcctccccaaagcgctgggattacaggcgtgagccaccgcacccggccttaaactagatttttaatctctttggacatcagttgtctcacctgtaaaaaattagggaatgcgactagatgatattctaatgcttgaattaagtgtttctgggaaatatactaaaattgcctcaactatgtatggcctttaaaaagacatccatttgttcctgtgctttatttcaggaagctgtattagttactaattacccagtaatggtataggggcaaaggagccggatttcctacagaaaattatataccaggctgggcgttgtggctcacgcctgtaatcctagcactttgtgaggccgaggcgggcagactgcctgagctcaggagtttgagactagcctgggccacatggtgaacccctgactctactaaaatacaaaaaaaattggccaggtgttgtggcgcatgcctgtagtcctagctactcgggaggcggaggttgcagtgagctgaggtcataccattgcactccaacctgggcgacagagcgagactcaacctaaaaataaataaataaatacataaaatctataactatttaactcagtctggctttaaacaatctggagttaatgtctcctatgcacgttcaattaatttaattacagtggttatcattttaggggaatttaacacttggaatactcctatttaactaatcattaatgccagtaattaatatacagtttagaaaaatggagatcctagcaaaaaccacaggctaaaaggaagacatcaagtatcctttcaacttgaggattccctactatatgtatatgtggctgaaaaagggacattcactctccgtgctcacattagggataatactgaggagaacaggaatcctagatgtaccaagatgttctttatacttaactgtagtcagttgatgtcttaggctttgaatagttcaccaagttctccacaccttttcaaagcacacaagagaggaaagtctgatgcctattttgcatcagacttggaagtagagagcaacatctgtcccttgattaacatccaaataagtaatggctttactgtggcatagaaagactagagtaggccggcagctttttctgaggaatttctgcttccctttgaaacaagaccttcatttccaataaataaatcactattaggtcttgtgtacatttaatttttatgcatttcataaataaacctcctgcataattactaactccatttctaactggaaattttaaatgtttgtatcagtgaggtttaatttttcctaaggcaattataaacatggctttttgcatgacctaagtaactggcttaaattgtcataactggtattagaaatgaatccatcttttttatactctaatcttttttttgttttgagacagactcttgctctgtcgcccaggctggagtgcagtggcatatgatctcagctcactgcaacctccgtcttctgggttcaagaaattgtcctgcctcagcctcttgagtagctggaactacaggcacataccaccatgcccggctaatttttgtacttttagtagatacagggtttcaccatgttggccaggctggtcttgaactcctgacctccagtgatccacatgccttggcctcccaaagttctgggattacaggcataagccactgcacccggcctactctagtctttctatgccacaataaaaccattacttatttggatgttaatcagtggacatatgttgctctctacttctcaatcatcttaaataaaaaaaaaaaacacttcaaacttgccatgtggctgggcgtggtggctcacacctgtaatcccagcactttggaaggctgaggcgggtggatcacctgaggttaggagttcaggaccagcctggccaacatggtgaaaccccatctctactaaaaaaatacaaaaatcagccaggcgtggttggcgggcgcctgtaatcccagctacttgggaggctgagacaggagaattgctgggaggtggaggttgcagtgagctgagattgcgccattgcactccagcctgggtgacgagagcgaaactcttgtcttcaaaaaaaaaaaacttgccatataagtatgtgatccatcccctatcagagcagaaagggaagagagaaagaatcctttctgattatgatcacagtttcctactttatcaaatacacctatggagaattactctcctattaacaagttaacttacctggtcctgaggaccatttatgtttccggaacagaataccaatgctacagaatgttgagtccccctactgacctacttccctccttgaaatggacttctatgcactagtttgggcttataggttatactgctgctgctgcataggtacatggtataagaatcatgttttttttatctttgagaaaatgagttaaaggcttgcttcttcacttaactgcaacacagtttacagattcagatttcacattttgctaagtataaatgacatatcttaagactaatgaaaactttcatgttttacttgtatttattatggtaacttttcttttcatagccatgttcactgcccacttcccatgagatttctccagtgcccgccagacctgactggaaaaagtcattatcttgatgaagcagatgtattttacctaaatcccttaaactggttacatagagagtttcatgatgatgcatcattgcctactcacttgatcaccttcagcattttggaagaggtaagtaaacatgaaaaagaggaaaactcagtattttaattttaccccaggtttaggaaaccctcaggtaaatagataatataacctttttatggtctgtttcaacccacatttcataattagtcttttctccagtcaaaattagccccagttctgtaactatcaaagtattttacttcctataagttaattcttttattaagcaaaaagttgtagacagcaattagaataggcaattctaaaattgactgaaacagtactcagcaaaatgtagcctttatttacttaaacatttatttgcttctaggaaataagcgctttcctaatttcaagcaattataaaagaactgctgttttcttccacactcacttgccagagggtcgaattggaagtcacatatatgtctatgaacggaagttaaaagggaaattcaacatgaagatgaaattctgaactttcctagataaattaacattgctgggtggaaatattcagatgctgcttaaatacttcggtaaacactgggtaagattcatggaacttagaaaaaagctgtatgaactgctttaccaaatatcactactgaggaaatgtataaaataccacatagtataaaattacatgttaatacaatgccagattttaaataaagacctttagttttcctcatggtgtagttttattgtttcttccacgatattcagatgtgcaaaaaatttcacaagaaaacaagtcagcaagctcttaagagggcagcaaattcttcacaagtcagagggctcttgaacccacaaaaagacaagaagtgagtgtaagattataaaatgttaatgatgaaattccagaacaatgtacttttctcaagctctgctgcaaatttaacacaaacatcagtgttaattacactttgtcatgtatgactgagcttgctttaagctcttacactgaaaggaagtctcatttcatgcacaaaatctgttgcatgcctggcttccttaataaaactacagttgaacatttccagtgtcaaaaaaaattcaacgaagctaaactacaggaaaatgcaggttagtagacttttaactaatgcttctgaggaataatataaagttatcaaactgatacttagaaacaaaagaaaagacattgtcatcttggtaatttcattagtttcaataccaaacattatacaaagcataaatttttctcttacagttgtctaatttaactcaattgtgaatcagtattgaggatcaaaaggtaattgccccaattctatttcaagatttgccatttgtcttccattagtgcgaccatatttatgccatttaccttcccttttataaggctgtggctgaaggtgcttctgctcttgttttcgatgcctggagttttcaatatttaccatacgttgctttttatcaggtcgactgaaagcagtaaacacatttttcatctatgttagagttcaatgtatttaaatttaaaacaattttaaatgttttctccattaatctatgatctgaacactgataaaagatattaaatatctgaattacaatcctagtatatccatataaaaataaaggagtctgtattagtttttttgtcctatagaaagaaaaaatagacaataactctactggcaaaaaagggaaacactcaaaagataacaaagaaaagaaatgtgacaataaaataatgagatgtgtttccattatttttcctcctttcctataaaaatcagtccctccccgctggctttatcactcagcagaaatacatacacatctctcacaaacaaagcaaaacaaaagtctcaactttttcttacagcaaaagctcacaacacctacaccgctttccttaatgtctatgatcaggcttccgtcactacttcactggaagtccatactgtcatcccctggccgcccagtttccaagccaagaaaacattttccgcacatcaactttttaaaaagcatgacacatttattccttttacttgagatggcttttggattttcaaggtaccactccccactcctgtccttagccttccctacaaccccatggatgttggtgttctcccaggagtctgataaatatacagtctcggcaaaagagatgaccatagaactaactgccaactaaccctctccacttgaatgtcagtagttacctccaaacacaattctcatctccaattacccttgccccaaaccttgaattccctatctcagtggtactactatccaacaacagatgacccaacccagaaatctagaagtcactgttactttctacttctccttcacaagaaatatcaatgttactattttccaaatgttttttcctttcctctcctactagtatagtcccagtttagatgttcatcagctcatgtctgtattatattgaccaccttctagcttcatacctttcccatcaatcctctaggctgctaccaatacattagtcccaccgtatccacggctttactttctgtgattgaggtttccgttacctgtggtcaactgtggtctgaaaatgttaaatagaaaatttcagaaataattcatcagttttaggcggggtacagtggctcacgactgtaatcccagcactttgggaggtagacatgtgtggatcacttgaggtcaggatttcaagaacagcctggccaacatggtgaaaccccatctctactaaaaatatgaaaattagccgggtgtggtggcacgtgcctatagtcccagctacttgggagactagggaggagaatcacctgaacccaggagacagaggttgcagtgagctgagatcgtgtcactgcactccagcctggctgacaaagcaagattccatctcaaataattaaaaaaaaataattcataagttttcaattatatgcctgttctgagtaatgtaatgaaataatgcagttctgctccatcccacatgggatgtgaatcatccttttcttgtgtatttacactacccacccattaatcacctagtagcagtctgttaatcagatatactgttatcctaccacagtgtttgtgttcaagtatccctaagataaggattaaggatgattaagtaacttaataatgaccccaaaatacaacagtgatgctggcatttggatatgccaaagagaagctataaagcgcctcctttaagtgaaagggtgaaggttctcaagagaaataaaagtatgctgagattggtaagatctatagtaagaacaaacctatgtgtgagattgtaaagaaggaaaaagaaattcatgcatagtatatatagaattatgttctatccctggtttccagcatccactgggggtcttggaacatatatcctgaagataaggggggactactgtaatctaaaatacaatataatcttatcccacccgccttgaaaattcttcagaagttctccatgtcctacaggacaaaacctttagcataaaatggggcccttcatggtctgcatctcttatcctccagctctaccctgcttccttaaagcagtgtatcttcacatctccaaatgaccttccttttaagtgaaattcccttccctgtctgcatagcaaatcctcatttctcttccaaaagctactttaaaaactaagttcagttcaaaggccacctcactcaagaagcctttccaaacacctccagacagcctgaggccaccatgccccataccttaatttcatttatttacttagcttgtgagctcctttgaagcaaaaatttttcacttgtctcctcaaggcagcttcacctttgttcattataggactagataccagcttaatgactaaagacaccagaatcagtctcattattttatagacacattatatttattcagaaagattaagtatttcaaaggtaaaaaatgaagctaacatttgaagattaggtaagtttcatgttacagaatataaagatgaaaatggataaaaaattattatgaagtacacacattagaatttgacttgcttagtttgcctctttgtgcctctacctttatcaaagataattatgtgactaagtatcataactaagctggtacatggaatggacaagtgaaaataggtgggacattagaattattatatatgagctcttctgacttcagagtaaaatttgtgttgctcattcctagcttccaaaagtgaataaatacataaaagattaaaggaaaataatttcacttaaggtgatcttttcatataaactataatgaaaagaaacaaacttggccaaagtaggattttatatattcttaactgatttttaagataaaaattaaaccatttgctcaagtcaaagtgatcacgttataatgaaatgttccatttgtaacagctaataatttttagactccatctttcaatttattctgaattctctcagtggccataaagcacaactcttagaaacggtaaccttacaagaaactcatcaaatcataaaaatgctatccaatctacaaatgttacaaactactgtaatgacacggttttatgtaaaccgacctgggtccatatggaggggaaaaagtgtgaccaaagaagtgtctatatatatattcatccaacttctcaaatactccatcattatctacttcatattccttcatgtttctaagataatctttaacatcattaacaaagtcagtgaagagcttctgatcatgtataaagacaccgtttaggaaaaacttattgatgaactgatcaagttcgttccagtgacaaaaagtatccagttcttttaacatgtacctttgaattatctgtctaaattcatccatccttataggattcaccactgtgttaaaaaggctcatggactcttgttgagcacaatcaaatacaccagaacaagcctttctgaaagaatgagaattttctctacaatcatgcccaggactgcatttctttgaatttgtattttttctgaattctttaaagtgaactggcttttctttccttccatcattttgcatagtagggcctctattatgatggttttctgtaggtgccttatactgtggatgtaaatagtcactaaaaactgttcttggtttttcagctgcttcttttgtagcaccaaatcttttattacccttttcatcaaagatattcttggtggtatctttaaagtgtctgaaagtggatttaactgaatctgagaattttttcagattttccttcacagcttctttagcctgcttaattttctctttatgatgccttacaaactccttggtagaattcttcatggcatcaaatgtttccttaactgaacccaaaaatgtttcctttgacttatttttagccctgtggcttcctctgccccctttcttttttccatctgttccttgttttccattttgatcttttgcctcaacatacaatctttcccacaaatcagaacgctgctgttcgaaggttagcttccgttccagctcagtgagtctttcccgtaagattgctatttcctttttttcagtatatacattgggagaatctgacttgccatgtaactgactaccacttaactgctggagttccccccttaaagccgtagttactagtcgttctctctccagttctctctttagcatctttgcttctgtcaacagagtctccctttgactaagaaagctgtgttttttctgcttttcctcttccaaatgctgcttaagtttctgattttctttaactaattcagtacttgtccctttatcttccaatattctaatctgttctcttagtttgtttaactcttcctgtaatgaggataaggctttttcttccttctccaaggatactcttaaatactgattttctgtagcaaggttcgttttctgagtttcaaaggacatcttctctgcttcagtaagtgtccaacaccttgcaagattttctttcaatgactacatttttttttgaaagagaagaaataaaatgtcaaatgctttaaaagctgaatttaaatcttcaagatataataccccataagcttttgtgtctttacttctacagatacaaccccccgggtagtattttcaatagtataaacattgggaaatacaaggttcatatgcaagaaaacgcagagcagagagctacatcaaattgagaactacagcatggtgtaagaatttttttttttttgagatggagtctcactctgtcgtccagactagagtgcagtggcgcaatctcggctcactataacctctgcctcttgagttcaagcgactctccagcctcccaaagtgctggcattataggcatgaaccaccgcgcctggctggaagaatttaaaagacagaaagttagctagagcttgcaggactaaaggcttttctgaatcaggaaaagagattaccttttataaaaggtaaaattattagctgggcgcggtggctcatgcctgtaatcccagcactttgggaggctgaggtgggtggatcacgagatcaagagatcaagaccatcctggcctacgtggtgaaaccccatctctactaaaaatacaaaaattagctgggcatggtggcatgcacctgtagtcccagctacttgggaggatgaggcaggggaatcgcttgaacccgggaggcgaatgttgcagtgagccgagatcgcaccactgcactccagcctggcgacagagcgagactctgtctcaaaaaaaaaacaaataaaaaataaaagtaaaattacatcgagagctgacttacggcttcaaaaattgtttgtactcagtgtacccttcaaaggatgaaattctaacaatcttagtcctatttgaaacattttagtcctatgcaattaacatttctaagtaagtacagataagccataaattctataaccatgttagaagacagactgaatcttgaacatttataactaacttatccaattttatggtaaatttttgaagttctgtaatctgtacagattaatataactctgaagattaatctatagattactataactgaaagtcagcacccgtggtagaaatcatggtcaattcggcttatagaattttactgcttcaataagggtatccttgactgatttgaattttcttttacacatatgcattagtaacaaaatctaaccaaaaacagtcaaaacttaaacaatatggttcaacaggttcttaaagcattatacatcgagttaaaaatatcctatgtataaatctgcaaaatgatacttaaatttggcttaatttatcacaaacgttatggttaccccatttgagtcagagcagtcaattacctggattcagaaataagaaaaaaaaaaaaggaaaaaaaaatacaagtcctttaagagaatgacactaatatacacttgaaaaataactatctgaaatgactgcttcacgttctggctcattaatcttcagagaacaaataaagatttaaaatttaatcacagtcatttcatctgctctacctgtatgagagaaaagaaatttcttctacccaacagcagtggactgtggagtagaagagactgatgcactggtgtggcataatcttgaaatgcacaagcccaggaagccacaggatgaaagaagagtacagcattcctcgtgcagtaaatatgatgttgacataagtgattgataagcagatcctgaccaggtcttccaaagagcttcaaaatctatctgatccacacttaacagccagaaataagagatctgtaaaaactgactctctagctgggcacagtggctcaatcctttaatcccagtattttgaggccaaggtgggaggatcacttgaacccagaagttccagaatagcctgggcaacatagtgagaccccatctctatgaaaaatttaaaaaccaagttggacatggtggcgtgtgcttgtggtcgcagctacttgagaggctaagccaggaggattgcttgagcccagaagttaaggcagcagtgagccatgatcacaccactgcactccagcctgggcaataagaatgaaaccctgtctcttaaaaaacaaaaacaaaaaaaacaggccaggcgcagtgactcacgcctgtaatcccagcactttgggaggccgaggcaggcagattacctgaggtcaggagttcaagaccaccctggccaacatagtgaaaccccatctctactgaaaatgcaaaaaatgaaccgggcatggtggagggagcctgtaatcccagctacttgggagactgaggcaggagaatcacttgaacccaggaggcagaggttccagtgagctgagatcatgccactgcactccagcctgggcaacagagcgaggctccatctcagaaaaaaaacaaacaaaacaaaaaaaaaacccaaacccaaaccaaactacaaactctctctagaggttaatgcgtggtgagttttccaaaagccaatgttatcctatggaaccagaaaacactgtggtgaagaagaaaatggcatcttctaatacaggtaggaaaaactgaactatttataattaacttcagaagtacctccctgtgtctacagccataacaccctaaatgccgccagtctcctctgatggcagaagctaggcagggtctggcctggttagtacttggatgggagaagtacctccctgaaagatacaatttagttacaaagtagtatttttgtcttttcaagaaatataacctgtaagggaagcatacataaattaagtgtgagaattgggggtggaaaaatgaaggaaaaaacaatagcttacttttctttccttttccttttttttttttttttttttttttgagacagtcttcctctgtggcccaggccggagtgcaatagtgtgatctcagcttactataacctctgcctcctagattgaagcaattcttgtgcctaagcctcccaaaaagctgggattacaggtatgtgccaccacaccaggctgatttttgtatttttagtagagacaaggtttcaccatattggccaggctggtcttgaactcctgggctcaagcaatccacctaccttggcttcccaaggttaccaactttgggaatttgggaggttgccaccacacccagacatagcttatttttctaccctgcatttctctctacaaccttcttaggaaaaaactagataagagaccagctattttgctgatcctcataaacccacagaggtgttaggtaatgacagaatggacagtacagtcctgtgagacgagatctaggtgagttataggcagaaaaagataacatgctctcccttccatcagaataaaaaaaaacaatggaaaggaatagctatgtcccctgatcaagagaagatcttagagaggctataaaaccaaaactctcctctttccctcctgccaactgaaaatgtttgcttcgctctgtgaaaataatgttaataaaaatgtctatatacacatataaaatgtcacttataaaagatgttaactataaaatagcagctagggataagagttcttaagtcaaatccttagaatcaattaattagctctcccaaacaaaacaaaacaaaacaaaaaaaggccatggccgagcatggtggctgacacctgtaatcccagcactttaggagactgaggtgggtagacggaggtcaggagttcaagaccagcgtggccaacatagtgaaaccccgtctctactaaaaatacaaaaaaatttgccgggcatagaggtgcacacctgtaatcccagctacttgggaggctgaggcacaagaatcgcttgaacccaggaggtggaagttgcagcaacctgaggttgcaccactgcactccagcctgggcaacagagcgagactccatctcaaataaataaacaaacaaacaaaaacaaactagctctgccagttgctaccttgagaaagtcacttaacttttctaaacctcttttccacctataaaagttagtaattgcttaattcacatattgtgagaataagagaaatactctatatggtacactcatgacaatgactaggacacactaaatacccgtactcaattcaacaatgatcagcattattactgatttactaatctgcactaataagcacaataagctctaactaataagcaaaataattactaacaattattttaaatactgttagtggtacataccttataatctataaaagattcttgttcctgttgacactgggaaagataatccttcatatcattcaattcatcttcatgtatctttctgactaactgttgacgcttctgaatctgaattgtgcctaaaataaatatttttattaaaggtatgtaacaaaaatattatcattaaatgttttatgtattttttaatattggtaatctgcatataagctatgtagtcttttttttgttttttttttttgttttttttttgttttttgagaagagtcttgctccattgcccaggctggtatgatctcagctcactgcaacctctgcctccctggttcaagcaattctcgtgactcagcttcccgagtgtctgggactacagggaagcgccaccaggcccaactaattttttatagagacagggttttgccatgttggccaggctggtctcaaactcccggcctcaagtgatccacccaccttggcttctcagagtgctgggattacatgtgtgagccactgtgcctggccataacctatgtaatcttgacaatcatttcattcagagtatcagcatttcaccgttctttaaaaattctgattacataaatagagaataagtaactgaggctgggcacagtggctcacgcctgtaatcccagcacattgggaggccaaggcaggtagatcatttgaggtcaggagttcaagaccagcctggccaacatggtgaaaccctgtctctactaaaaataaaaataaaataaaataaaaaaagaaaagtaaatgaaagcccatgatcaatcattcatcaaatggtggtgaacgttaacgtaatataagtaaggccaagtaggctagttcttaaaaacatttatttacatacacccaggaacatttaagcagttcactatcttttgtattaaaacacacaggccagcccatatggctctaaccaagagaacaatttatgtaatgttcttatcttactatattgaaggcactcagc

SEQ ID NO: 1126 - DNA, 2708 bp, Homo sapiens
cgctaccgcctgctcccctccagagaccgggggccttccagcagttttcggacccccgagcacagagaccgccaagccaaaggcgagtagcaatccctcggttcggaaacggcgaaaggaaaccgcaaggaggccaccacgtcgggtgggagctacgaagttgcccgttcccggttacttccgggcttgcgagcgacgactgctctcaaaggccaaacttaatggatggacgagcagcgcgctactgcagctttcttccgccttaggaaggtggcggccagggatgaggaggcccctaagcaagtgcggaatggagccggggggcggagatgccagcctcactttgcatggtctccagaaccgctcccacggcaagataaagctgcgaaagagaaagtctaccttgtacttcaacacccaggagaagagcgccaggcgccgcggggatcttcttggagaaaatatttatctgctcttgtttaccatagctttacgaatattaaactgctttttagtgcagacaagttttgttccagatgaatactggcagtctcttgaagtttcacatcacatggttttcaattatggttatttgacttgggaatggacagagagactgaggagttacacttatcccttaatctttgcaagcatttacaagattcttcatcttttagggaaagatagtgttcagttgctgatttggattcctagacttgcccaagcacttctgtctgctgtagcagatgtgagactttactcattaatgaagcaactagaaaatcaggaagtggcaagatgggtgtttttttgccagttgtgctcctggttcacatggtattgctgtaccagaacccttacaaacaccatggaaactgttctcactataattgctcttttctactatcctttggaaggttcaaagtctatgaacagtgtcaaatactcatccctggtggcacttgccttcataattcgtcccacagctgtcattctgtggacacctttgctcttcagacatttctgtcaagaaccaagaaagcttgatcttattctacatcattttttacctgtaggctttgttactttgagtttgtctctgatgattgatcgtattttttttggccaatggactctggttcaatttaattttttgaaatttaacgtgctgcagaactggggaacattttatggttctcatccatggcactggtacttcagtcaaggatttccagttatcttgggtactcacttacccttctttattcatggctgctatctagcaccaaagagataccggatacttttggtgactgtgctgtggacactgcttgtttatagcatgttgagccacaaagaattcaggtttatttatccagttttaccattctgtatggtgttctgtggatactcattaacccacctgaaaacatggaagaaaccagctctaagtttcctgtttttatcaaatttgttcctcgccctttatactggtttagttcatcaacgaggtactcttgatgtcatgagtcatattcaaaaagtttgttacaacaatcccaataaatcttcagcttcaatatttataatgatgccttgccactctactccttattacagccatgttcactgcccacttcccatgagatttctccagtgcccgccagacctgactggaaaaagtcattatcttgatgaagcagatgtattttacctaaatcccttaaactggttacatagagagtttcatgatgatgcatcattgcctactcacttgatcaccttcagcattttggaagaggaaataagcgctttcctaatttcaagcaattataaaagaactgctgttttcttccacactcacttgccagagggtcgaattggaagtcacatatatgtctatgaacggaagttaaaagggaaattcaacatgaagatgaaattctgaactttcctagataaattaacattgctgggtggaaatattcagatgctgcttaaatacttcggtaaacactgggtaagattcatggaacttagaaaaaagctgtatgaactgctttaccaaatatcactactgaggaaatgtataaaataccacatagtataaaattacatgttaatacaatgccagattttaaataaagacctttagttttcctcatggtgtagttttattgtttcttccacgatattcagatgtgcaaaaaatttcacaagaaaacaagtcagcaagctcttaagagggcagcaaattcttcacaagtcagagggctcttgaacccacaaaaagacaagaagtgagtgtaagattataaaatgttaatgatgaaattccagaacaatgtacttttctcaagctctgctgcaaatttaacacaaacatcagtgttaattacactttgtcatgtatgactgagcttgctttaagctcttacactgaaaggaagtctcatttcatgcacaaaatctgttgcatgcctggcttccttaataaaactacagttgaacatttccagtgtcaaaaaaaattcaacgaagctaaactacaggaaaatgcaggttagtagacttttaactaatgcttctgaggaataatataaagttatcaaactgatacttagaaacaaaagaaaagacattgtcatcttggtaatttcattagtttcaataccaaacattatacaaagcataaatttttctcttac

SEQ ID NO: 1127 - protein, 546 aa, Homo sapiens
MRRPLSKCGMEPGGGDASLTLHGLQNRSHGKIKLRKRKSTLYFNTQEKSARRRGDLLGENIYLLLFTIALRILNCFLVQTSFVPDEYWQSLEVSHHMVFNYGYLTWEWTERLRSYTYPLIFASIYKILHLLGKDSVQLLIWIPRLAQALLSAVADVRKLMKQLENQEVARWVFFCQLCSWFTWYCCTRTLTNTMVLTIIALFYYPLEGSKSMNSVKYSSLVAFIIRPTAVILWTPLLFRHFCQEPRKLDLILHHFLPVGFVTLSLSLMIDRIFFGQWTLVQFNFLKFNVLQNWGTFYGSHPWHWYFSQGFPVILGTHLPFFIHGCYLAPKRYRILLVTVLWTLLVYSMLSHKEFRFIYPVLPFCMVFCGYSLTHLKTWKKPALSFLFLSNLFLALYTGLVHQRGTLDVMSHIQKVCYNNPNKSSASIFIMMPCHSTPYYSHVHCPLPMRFLQCPPDLTGKSHYLDEADVFYLNPLNWLHREFHDDASLPTHLITFSIEEISAFLISSNYKRTAVFFHTHLPEGRIGSHIYVYERKLKGKFNMKMKF

SEQ ID NO: 1128 - DNA, 89418 bp, Mus musculus
  misc_feature (1)...(89418): n = A,T,C or G
gacactcttctccgagtcactgtctacgaagtcacaaacacagatcagcaaagaccagtgaagcatttgcaaggcgaaccaatgcaagaatatcctctcacggtctgtgggggtcatatttatattctttctaaacatcatgtgccctctcacgcatccactccagcgaaatatcacatgccctttcacaagtgagcttccaggaaaaaaccaccacattgtctgttctcagcaaaacatcctctgacatgtctgcttcagcaaaacgtcctcttgtaaggcagcttccagaaaaaaaaaatcacatgacacaactgagtctccaaagaacccagaaatttctactgcaggttgataatgattgggaagcttcctcctgatactctctgatactctctgatactctctctgatactctctctgatactctctgtgatactctctgatactctctgtgatactctctgatactctctgtgatactctctgatactctctgaaactctctctgatattctctgatactctctgatactctctgtgatactctctgatactctctgatactctctctgatactctctgatactctctctgatactctctgatactctctgatagattctctctttagagtagtgctgtgcaggctgtctggagtaggaggggggaggcatcaacagtcttactcagctgtgaatgctgtgagctacactagtgactggtgtgccaagatatgctcgtgagtctaataaatagtagcacaaatataagggagtgtccaatcactttctgtgggctttaaggcccttcattccacatgaggaaattcatgtctagtgatgtaaacctggctaggaagtgagagctcacaggctccaggcatgaacctacttctattgttttgctaaatggacataaagctgtcctctaaatccatctctttacacataaatgagtgcagctctcagacactcagagaagtgtctatgtgcagtaaacagtcgttactatagaaacctacaaatggtgaaagtgtaggggagacatgtctatgaagtatttggccacaatgtgacatttgtattacaactttcctccctcccaagacccaaagtctatcattcaagaagaagcaggaagatcacaggagccagaggtctgagcaaatggtacctcttgaacatgacaggaccactgcacttatgaaacttagtagcagctgtggttatcctgttgaagatcaaaacagccaaccttctggcccccacctggaaccgaatagctattggcttttgatggatcccaggacagaataatccctggactcagtggattatttaaaaagacaaaaacaaaaaccaaagaagtaaagttgggaaaggatgtgtgagcttaggcggggatggaggtgtgagcttagaagttatgaggaggactcagaggtgaatatgatcaaaatacacaaagaattgacacaaatattatatttaaaatgtgctgggttagcatttattttatttttactttctatttacttattaaaacaggatctcactctgtctctgaagatagcttgaaactcacttggcagcccagcctgaactgggacttgctacaatccttctgttccctgagttctgggattacaagatcaccccatcatacctatctggctttatttaaacaaaacaaaacaacctagtgtgtaaaagcttttagtttaaaaaaaaaaagaagctttttagttaaaagttaaagctcttgatgctctttcaatgtttcttgtgcccccagacttcttgctttgtacttaaaatggttatatcatggctgtcttcccttattacacactaatacacacactggcctcactagcagatcttactctaaagcttttccagcgatagaagaggtttctttactatctcctccatgtgaccgagcagagcaggcagtgcatacatgcaccatctgctaaaacacattacttaaagtctgatcacagtttccctcctacaaagtgggagagagtgatcctgccataaagatttaagtccctgaacaagcctcaaccctgccactccccggcatccattctaccaatacttcataacaaaataggacatcgtttttttaaatgccaggttgggaggttggggttatgtgctggctagtttatgtcaacttgacacaagctagattcatgggagaggagggaacctctattaagaaaatgcctccataagatcaggctgtaggcctgtagggcatcttcttaattaacgattgatgtgggagggcagacaaagcccatcagggttgagcctcccgtaggctgtaagaaagcaggctgagcaagcactatgaagcaagccaataagcagcaatcccccatggcctctgcatcagctctgccttccaggctcctgcctttgcttctaacggtgaattgttgtatggaactatgagtggaataaacccttccctccccaagttactggtcatggcgtttcatcaccgcaattgaccctaaggcagtttacaaactgcatcatcaacccataagtgacctcgttcatcaagagtcttgaactttcccacccccttgagcgttctggcttggaaacagtgtactttaaagaattcttaagaaacacaatctttgatccaagaaagaagcgcttgcacttagccataagcacccctgctgacctacacgtcaacagcttccctgaggggcttccccagtggactgtcagttcatcggtgcaaagaggcatggaagtgccaccctcaggtactttccaactgtagcacttgcaggataaatttctgagtttgtttctacatcaaaacctgggaggattaactgagaagtaaaaatattaagcagtagttcacgatccaactgctctctgtgcctttaaggattcccccaaggagagaggggaggaagggagtgacccttggttgacaaaagaaaatgtaactgtttcctcttcctgtccagaacgttcagatctcctagcagataatcttaggagtaggtctctgaaatatgccgagggcatttcaccgtcccgaccggggcccatagcctgcaccggcgttaacaaggcctggcttctccggagcacgcgggcattctccgcaggcgtggagggtgctgcggtccgggtgcgagtcccagctgcagcctcctctcccaggctcccgcgccccgcgctccgccctgggcgggaccttccgtgccccgcctgctgtgcacggcctggcaggtcccgagagccgcgccgaggccagtgccccagagtaaccccgcgggcccgcccctcagctcaggctgcccagttcggcgccgtgattggcgggcgccgccgcgggtgaatggcgtgaccccgctcgcccactccccgcccacccacagctcggtgcccgggtgctggccggaagtgaggccgtgggggtccgcgagggtgcgggggggggatgcgtcactgagacagagtcccgggccgagggtccctcgggccaccgcagcgagcgcccacccgcactggagccttggagcctgggcggggcctcgccaggttctgctctgggctgggctggcgtgcggctggttgtgtagactactaccctgttgaacataggatttttggactcagccgcttcgagcagatcacatgcagacctcagtaaagggggggcctcttgccgtggtaaagtatagagggtgagaatcagtaagcaagaccattacagagtgtggacgtgctgggagagaaggaaactagacggggactgggtttgggcagggtagtgccagcctggtggggcctatgaggaggttagaaaaggagctaaagagggggagtacacgggctttgaagcctcgctttgcagtgttctttcctcgttctctcaacattgaattcttacagcttttaacttttttatttgctaaaagtgcatcactttccctaacttattgtttgttatctgagttcccgggagtatagcatttccccagagaccagtcagtaaatatgtacatgatgttactgctggctgggtacagagggcaatttaaaaaaaaaaacaaaaaacaaataacatattcgtgagtgtttgctgaaaatcagttctctttatgcttatcccattcacccagattagcacccctcctccctgccctttggaagcctttcttgaatatctatctacaacacagctttccacagcgttcatgccctgaaacttactctgactcataagctactgaaaacacagagtcgcataggatgtttgtgttagatttttgtgttactatagttacctgcaatgtgtccatagtaataagtgaagagaacaacaagcaaataaaaacgtatagtatcaatttgagactcccgaagtcgtatttattttgaaacaacctactgaatctaatttgctcttttgatcatggagaaagtaaatggttttggaatggtgtgtgtgtgtgtgtgtgtttgtgtgtgttttaattgatggtcttctacaagtctacttcaataaacacccatttctttttgctttttatgtacctggctcaacactatactagaagtttctgcccttatcttgaggaagagagatattagaaacaggaagtgacgaagggagcagaatgctctagctatggggaaaggggaaaagaaacattttgttctgctttacattctgagaaacaaagcctagtgagagaggaagacaaaggaaaaggatgaagtaaatgcacattggaactctaaagacttcaatcttctgtaccaatgagctgcatggtaataacattgtatcctgtacgtcctggttttaatcagttttcaactgccccaaatagatgctcagaaagtgtttgtttaacgattgcaaagggcagcacgctatgtaatcatttagattagaagtcaatgcagcactttgacataaggggatgtgtgcgtttggaaggaaagataccatgcaatcgaatggcaagcaatagtcttcaaaaactgattaagccggtgctgaagagatggttcactgtttaatagcatgtgttgccgttggagagaacctggggttggtcccctacaaccccatggtggctcaaaaccatccctcactccagttccagggagatctgatgctttcttctgtactccctgggcaccaggtactcacatgatgcatatgtgtactatacaggtaaaacacttgtgagtataaagtaaaaagaacttattttatataattaagctgactcaaaaacttgtaaattttcacttgaatcttacgtggtgaaaagtgcacttgagactgtgagaaattgtactaccatcttttggcatgaaagagtatgtctcctgggtcaggcgcacaaaagcaaggcttttcacaatagacttgtaaccaaaataccaaatgacctagagtgactacatcttttaaggctaattgttagagaacttgtttttataaattatagaactggggcaaagactattgagtacatatggccagctctaacagaatatatcttactttgaaagtatccttagccagggttcattccctaacttcagaagccgtatcactacactctaccagtttacacagctaatgtttggctaacagtaagcttatcaacagctttttatctaacctttagctcttgaatagattattgaatcaaataaattagttttaaattttatcttgataaccagcaaaagaaaagactcaatgataatctgacttggttgaaaacctttatttccacttagataacaactttattgagatatgatttataaagcatgaaattcaaccaagtaaagtatagactccaagcatttgaagcagttaagaacttcctgaagccaggtcaagactttaattttaccaactggctttgcagccatagatataccacttgagtattctatggctttatatatatatttaatcattgtgctgttgacagaataaagccaggggattggagagatggctgagagtttaagagcgcttgttcttaccaaggactgaggttcaattcccagaactcacaagtggctcccaactatgcacaggatatcaagtgccctcttcttatctcttggggcactaggcacacatgtggtacacagacatgcccatgagcaaagcatttatgtatgtatatgtatatatatatatatatatatatatatatatatatgtacaataaaataataagaatgatttcaatcaagctttactgggaaaggtcttagaaatttatcagtattaaaagagaaactggtaccagtttttaactttatttttaaaatgtatatgagtgttttgcactcgcacacgtgtgcatgcacgcacacacacacacacacacacacacacacacacacacacgtcatgtgcatgcctggtgtctgcagaggtcagaagaaaatattcagtctcctgaaactggtcttacagatagttgtgagcttccaactgggtgcctgtaactgctgagccatatctctggcccccaaaatttgactaattgttgtaataaatataataatttctatctaatgggaaagtgtttgatattcaaattaatgcaaacttgagttttttaaaaagagatttatacttgtgtgtgtgctcgcatgagtttatgtgtgtcacgtctgtgcatgtatgtgaggaggccagagagtgtcagatcccttgggaatggaattgcaggtgtttgtgagctgcctgatgtgagttcaagtgttctgtaagaacaacaaatgctcttaagggctgagccatttctcagtcttgccttcaccctaattgtattgctctgagtcctgggatacagtcctaaacagtaagcttattagaggatcaggtaataactgttaaaaagcaaatgtggtatgttaaatagtaatgagtgctaaggagaaaaatagtaaagaggatacagaaaacaggaggcaaaggggaaggtggtatggagtgacagaaaaatgtcatttgcttcctgaggaggtggtgtttatgcaaagatcataatgaaacaaagttgcaagccttaagccattgctaggttaaatccttgcagacttagagaaccagtaagagccagggttctgagctggtctagtgctcactgtatccaattaggctattgttttaaaaagaccacaatgtccagcaaggcttggttgtggaaacctgactggggcgatgagggaatgacaacgggacagacatgcttacaaaaagtggaacaagtcactttgatgggatggcacctacgactggacaatctggagcctcaagaaactgctagctagtcttagcagatctccataggggagcagtctcaggctccaagggaaggaagctaaagttgccttggcatactggccagtcattcttctatactcccacttggaccagagggaggctttgctacgtctctgagcctcacccaggtgaaggtgctgccaattcccttgggtctaaggcattggcctttgtcaaccatgcactcagtcaaggcttcctctgttgcaccacaggaggtggatacttttagaagattagaaaaatagcaacatgctaaataattaaagtccaaaggcttttgttaggatttgggctttaatactctgttgagacgggaagttgataggtagtactgcattgactggaaaaaacaggagaaaaagaagaaaaagaggaagaagaaaagaagaaaggggagcaagagacctcaacagatggtacagtgtcattcttagtataaaaccacagtcatcctagattctactcaacttggagatgttcagagattaacatagatttttcactttagagacaggtttcattatgccatgcaaatcgaacagtagcagcttcagtcattagaattcggtattataatgaagctgttaattgcatttttaattcaactgcagctgctattgcaataaaacaaattgcccaggatattaaataattccttcctcaaaagtaatactgaagcagtccttacatacttggaagtgtattagaggagatgtaggctcactgataaaaacgaagagcaaagtgtctggggtggggggtgctgccataatttaaaagtaaatagagaataaaattattatttaatagaaaaaacacatttttttatattaccacatgaacactactaaagaactatctcaaatcacatatgctaggtaaaatggcagggatagcttctcatggttcttatagttcctgaggccaagaatccagttctcatggtacccaaagcacttctcttccattccatcacttagtaagcctggcactgaatagggattttttatttgggaaaaaaatagctaagatgggaggttatacaagttctgtgcgtttcttgcagatttacacttgaattcaaagatactaaaatgggggtagctatgaggctggtcatttcacaccttgtggagtggagtaaatttagctgctgtgtcagggaaggtcccgcctgcctctgattgcatatgtaaattacacactgggaaccctaggaagagaagagtatgccttgctagtaaatagcctagagaagagttaagaatcctgaacaggaggaacacggatggcaagtggagctgaaacagggatcaaacatggcaccgctgagttcatgcttcacccattcaaaaaaaaaaaaaaaatggttaggacttcttgtcatactccagattacaaagaactgtcgcagatgatgcctcgagccttgtaaatgccattgaggggagaaacaagctagatttagtgcattacttgcctacagatcttagcggtccctggtatgtgaaagctacgagacaattacaatgaacacggtgaatgctaggaggccaggttgcacagatgaccactcacatgccacttgaacgacacttcctgtatagacagacagacatgcacttatggttagcactcagcactgttgcggggaaggcggtccttactcagtgtttatagaaatgaatggcaactaattgttattgctacagcaatttgtgaatgtttaaattatctaatgtttatagtttgtatattcgtattcctatgacagtggtctgggtcctggaacattgctgaatatacaataaacattttactataatttaaaaaaaatgtttctacactgaatgactgcttggctgtgttgtgtcagtgggtgtaaagcaaagggggcacaacaaaaggttacatttctaacgtttgaagtaagagttgtaggccttgatttatcaaacagcagcgaaaactagaaaggctcttatgtttgtacctgcgtcccttttaagtctttgaatttgcccagctgaaagacattacagtatttcattacaagactgataatttcgtagagtagaaatatcaaaactcccaatagtgtgtgatcaacctatcctagaattacggttgcaaagttctgagtgatttctgttgcttcaatttgcgcaacagcagctccacctaggttttagaacccttgctaaaaccatgaaaagggtccccttcacaatggtggcgaaacccgttaggtgggtgggcacctgccaaaacaaaaacaaaaacaaaaaaaccaccgccaagcctgcccctgccccccggctgttggaaagagttcagggcatccagaacttcactgtggctattgcgcagactctgcgtcccacgcaggcttattaggaagaagcaagaaaactgccccgagacacgtgaaccacaggagaccaaccctggcttcctctgctcaccgcatctgattctggaatttacaatcacgaaagttctatcgccccaggattggttccaaggccgcatgacatcatagcgcttgatcctgcctccgggctcggattggctggccgcgccattgtgacgtcacggtcagcccacgccggggttgaagctgccgggcgccttcctcttgcatcgcggctgcagcttgcttctgttcccgcgcccgcttgcacatcctcctgctcgcgcggtcctgctgccgtccggtgctccccgtagccgctcaggcagagaggtgagccgcctgcttcaggaacttggcgggtgccaaggcactggggtgcggccaggctgctggcgccgtgaggtccgggttgggcggggggcggcaggcaccgtggcccggcgagcgcggggcgcgggccgagcggagctccgccgggatggatgctttcgcacctgttcgtgggtggcagccactttggcgcactgacaggcgcggagatcgcagggaaggatggcggcgcgcttggatcttcctccgagctttctctgagcgaccgtaagggctgccgaggaggagtccgcgtgggtccgtgcagtaccgggctttggggccgcgcgctggcctttccctgctttcctctcctttgctgctgccagggacgcccgctttcccgcgaccactccagcgggtatctgcagcccagcctgccccgggagggtggagacgcggacgcatagctgcgggtaacggcctggagtctgcgaatccataaagtgcgctgctcagagttttagggaaagtgtcctttattgtttgcttgccagcaagccttccccttcccctatccttgaggtggagatagtaaggtccagagagagttctttttagacgatcttgaagccttcggcacctttgaacttggcgtccctgctctagattacattatgcttatctccaggcgccttgattgcaaatttgaaggatgcattggatgaattttcgtaaggggagggggcgattgaaagaatgcaacgcatgactccctagctggaggatacccggggagaagtctgataagaaattgtgggggagcgagcagccctcctcccaagcctcgactgtctttctgtttttttaatgtcagggctggtggcaggaagtgttttgtacagttgtacaggagggccagtgttgtctgttggttttgtaattcgttcctctaaccgcttggcagttataacctgttggtttgtacttgcaagtctttgtgcttttgcaaagtctcaggccacagcatttgggtcaaaaatctacagatacagtcagctttgcattagatgaatgcgaatgcacaccgtagattttatctatggctgggcacaggtgcatcgtttatctagtcagtcccagtactgccgggtttctctgcgaaagctctgaccttgaaaaaaaaaaagggggggggctactttcctttgagatttttctcctgataacgtcagtgccaggaacatccaccataggccatctccttttctattctctttttgtctttcagtttggaactgaagacagaaaggaggaatgttatatactttcacagaatggagggtaaacttaaccatgaataggaaacatgggtgttgggtttttcaaaataggtaactagtaagtagttcttacttgactcggtttccttgtcagccagccgggtcccatgtaactgatttatttattaggtggtttcaagagactgtaaatggaagaacccaacagggggtctgctaaatagtggtttgataaatgtttccttttccttccctgggattaacagtgtttctcttggccagagccttagcctttggatgcctgttgttcacagaattctttcccccagcagttccgctaattactgcttgtgctgctgttagaggggaagtactcacctttgtgctagatttccaacttgaagtctacatacaaatcgaggcaaaattgccttgtcttccaggaactatggcagagtagagcatatttgttgcctaacaaaaaaactctgacacacactaaccttcccaggggtgtgtgtgtgtgaggtgtgtgtgtgtgtattctacttttgcctgccaattcacaatatcatagaccacttcctctcagttgcctgtcttttcctgcatgcgttcccattcagaggccattcacatggctgctttccccatgccttgtttctgtttttcctgctgcagagagctgaacccagaagttcacacgtgctgagtaaacactgccactgagctccttcaatcctgcgtcatgaactgatgctaagaacagatttgctaagtgtttctttccacaaaccagggtcctctagggagtcccattacccatctttttgttaaaaaacctggaactagcagccaggtgatagtagcacctgcctttagtcccagcactcaggaggcagaggcaggcagatctctatgagttcaaggccagcatgatctacagagctagttccagggctagggctgcacagagaaaccttgtctcaaatcacccaaacaaacaaacaaacaaacaaacctggagctaaggcccagagatgttgactttctgaaaaacacacagccttatctccaggattccagcttctcactacatctgtctgttgttggattgtttgtctagtcagctacatgtcatttatgtaattgtgctatttgctaacttaaaatactctaaccatgtgctgaaccatcttaaaccaaactcagcacgtgtgaacttctgggttcaactctctgaggcaggaaaaacagaaacgaggcatgggggaaagcagccatgtgaatggcctctgaatgggaatgcatgcaggaaaagacaggtaactgagaggaagtggtctatggtattgtaagttggcaggcaaaagtagaatacacacacactaaaccataggattaacaatttgctgtttctcagtctgcctgaagtatgttcctgtatttatcctattcttgattcatttgttttaagacagggtctcattgtagtctaggccgacctcatcttaggggtttctgaaaggtcagccctcaacttctgatcctcctacttctatctcttaagcacagggataataaggtataggttaacatttggtctgggctgtgctgggcatgggacccaggtctggcaagcagtgtaccaactgaggtatgtccccaatccacaattcatttttattaactttctgacttagtgggtatgtgttaaatatgtccatggctggggtgtttggatccaaagatgagtgaagcagtttctgattccaaagggcttcttggtttggcttacactgggagcccttttgtgcatacttattttatactttacaccaaaagagagccagaggtaggtttctgggacacatggcacaactgtccgtcagatagtgcagtgcctaataagactgaattggtcagggtgctttagattcacgaagcaaagcccagtttacataagctcaccatcgcacctttgtaatggccttgaaagcaagacctttgctccagtgcactgcagtcctctgacatgctggttatagatccttaggctcattttacaagatgactcctaagaactgtctggattccccctgaggtgctttgctttaagcctcggcccctttaagcacggccaggcagaaggatccgataacctggtattcatcccaccggtgggttgactctcaacctcacctaactggctgctatactggctgttagggagggcttgcattaacaccaggttgttgaaaataaggggaagtttggagtgtgaacaagtatggaatcactgaacaagaaggaagtgcaggtgactgaagctggtagagacagcagaagtccgactttagcctggttgtgctgtaataacggctaagttattaaggtggtggtgtccgagtactagatcacttcctgagatcggacctcactcagactctattaattgataccagaggattcttactttataagaagatgctcagtttagatacttgcccaaggtcacaactcatgcagcctagacggtgctggtgccaaatcctgtcttctttcctgagatgtctcgtaacagaatactacaagtagagctcccccccccctgtgactctcatgtttacccttttcctattcctatacaaggacagcttcggtggtgcaaacaactgaaataacaatgaggagatgtagaggggacctttgcattgcaggcatttgtctgtctgtgagtgtggcctgggctggagtggggtgctgatggnnnnnnnnnnnnnnnnnnnnccccagttctataatttataaaaacaagttctctaacaattagccttaaaagatgtagtcactctaggtcatttggtattttggttacaagtctattgtgaaaagccttgcttttgtgcgcctgacccaggagacatactctttcatgccaaaagatggtagtacaatttctcacagtctcaagtgcacttttcaccacgtaagattcaagtgaaaatttacaagtttttgagtcagcttaattatataaaataagttctttttactttatactcacaagtgttttacctgtatagtacacatatgcatcatgtgagtacctggtgcccagggagtacagaagaaagcatcagatttttatggccccccacccccaccccccccgccccggagtacactgggtgctgtgcttaggaaatagggaaataggagtcttgtcggcatataggatggcttggctaggatggaggctcggattgtggagagagcctgagattatggagcggtaacagtctggcttacctcccacaataaatgcatgtgacagactgaaaaagcacaggctcgggattcgcggttcgagtaaagcacacgtgtactagctagtgttgacgtttggaaaggcatgggcattggtgggtaaaactggctgcgttgtcccttatcttcacctgctatcaacatgagaaattagttttgagccctggtgtctgtctgtctgtttgtctctctctctaccccttcctcccccattaaagatgaaaggttaacatttcttagtttcagttttgccaagaataaaccctttgtttctgtttggcagtggattgagaatgaaagttgagatctcttaggtctcagcaggacaactggtggggggattgaagcagtggaagcaaactgctgctcttctgactttcggagcttggatctaggagatgtttcagcctagggaagcaacttgttaaggtaacacatctgacccaatgtaagtttctgtgatagggcctccctcccatgccctgatttcaacccataaatgttactgtaccaaactctgtgaccccgggcttaaaacagtccgacttggtgcgtttttagacgtttaaattgcagcatagagaggtgacttggcttggcaagcctgaggacttgttaggtactcagaacccaaagctgagggtggggtctgggtgggagctgggagcgatggcatccatttgtagtcacagcactaggagacattggtaggcagattcctggaggtccctgaccatccagacttgacacctcagaaagttacagaccgatgagacaccctgttgtgtccccaaccccaaaggacagcgcctgaggtataatggcatgaggatgccctctggcttccccaagcccacaggtacacaactacacagagactagattcctacccttcctgtcccttctctccccacctattgtgtatgacattcagttgtaattgtagtcaggtagtaaggggtaccccaggactccttattgccagagagactttagtgcttttggcttcacatcttacattgtttgaggtttacgatttttcagtgttgattctggcttgctttttctaactcgaataaccattttcttgaaaaaacacttgtgacttttaagtgcgttcttagttcctatatgaggctagaaatgtcccctcatgctcgggatgctttctgctggctgatctcccccctgctcttttcttctcctggttaacagttacttcttgctacttctaggaagccgtcttgaatgggctttattggaaccagacctggggagttggcctctcagggatgtgttttgtgtttccaaggccaggagttctgttccccctttgtcttgacccagtaaatgctgtgacaaagtgattgttatgaattctcctcccttaaagaatattctcaggataccaaattcagtaattactcatttgcttctctggggtttcagcagtatggtgagtccccaggggtagtgttcaaggcacacctgcttctttggagaagaaacaaattaatatttacagaggttactgaaccccagtcagctgttttgttagttgatttgcacaattgaaaattagcattcaattctgacagaactggcgaatgtcttgggaatttaaatgcactttaggatctgagatgcatttaaaggaacatcatgcatgcatctaaggaaggcaggctgaagggcacgtgttaagagtcagtgccttccgagttagcagccacacacccaagtaggcttccacacttactgaagtgtgggctgtcatgggtaagttatgtcacctccccaagatcccagcatgtgttgacagttccgataccaagtgcgtccactttgagtggtgctggatccatcaatattatgtgtgaaagttaagtggggggatcgactggttattgcaggtaagaattccctctgtacaggatgccacttgaagcattgtttaatgtttcaaggtaggttagaagatgttctaccacagaataaactgggccatagcttggcaagggcaggcatacacccactggtgtgtgcaaaatggagctggtctttgttttgttttgtttttaccacgagccactttggttaagtgctcggcataaactatttcatttccagtagctcactggaccttataaggtaagagcctgagttttacagatgagaaaccgggtttaggaatggtacctcggtgttcagagttctgtgcagagccaggcgagtgccgcctcggagtctcctaggcccttgcagtgctctaaccccctaagggcacctgcatgggcagcccttcgtcagaaggcacaggaggcaagcgcagttcatgtccatcccattctgggaggttggtgacagcataaatgctttgttgactgtaactaagcagagctttagaggaagtgaacagggactaatgacccttgtggtcagggcttaagaggggaactttctatttcttacctttagatagtctgaacataaggcttgtctgtttgaacaatggcgctggtggagcatctcaggcagaacgcttgcttaaggttgcccaaggccccaattctgttctcagtactgcgaaaacaaaaagtgcagacacaggactctgctggtctaagaagccagtgttgagaagcctcctgactggcctagggaagcccgagttgctgtcctgatgtggacttggccccagtgggttttctctacatggtgtgaggtctgcgaggtgtatgctgcactgggtaggaaaggcacccaggttccataaggagcatcctctatgccctgagaatggacgtgtcagtcgttagtggtttgaggacacgaggtcattctgctctgttagagctggtgcgctgggctggtgtttcagccggaggcacctgctgccccttctgttctcttgggatccctccggcttctccgcactgaatcttccttctaggtgagcatagtcactaggtttgtctgacacgactgagacgacttgaaagtacctttgttcctaaaataaaaccactagtcatatgacggcttatatattagcaaggaatctgataataaaaccatcgtgaccttgggccacaatctgtagaagagatgaatacataaatactattattatgtttgctttttaaaaactacaacattgcaaaccggctttgaaaaatagcctgcacgttttggttctgggagccctgcagtcacctccacacactggaagtagttataagatacagatgtttggtcgaactttaacaaagaagtgtgttttcatattgcttgcttaaggttacacgggctcgaatggaaaccttttaagtcattttctgctgagggattgtataattctgttatgcctctcctctcttttaattttaacttggactataatacagcctttgtacgctttgtacaaattagcttagagaacattagaatttattttgaatattcaagtgctcacatcagccatgagactgcaatcagataggaattttaagtagctacccaaaaaagaaaatactgcttaaaaaccttgtgaatattcctctcgcagctatttgcactcgcggcctgttgagttagttgttcactgcaccactgaggcagagcactgtccatctgagcccggcctctaaggcagctgtgggaaaggaagcagctagagttgtcttgatgtcttggctgctgtcttttgtacaagtgcatttcacacaagaaggtagttgctctgaacgggtgggagcttctccattgagacttttttaaaaaaaattaattacttgtttacatttcaaatgtccctaagatctgtcaggacctccatgtccctagacaggctatgaatactgcagtggcttcattgtcaagacaagtagagtttggaatggacctagtgaccccaaaggaggttggctgtgaccagagaacattgagaccatgcatccctttcttctgcctccctcactccctcccttccattttgaacccaggacttaaaccatgtatgtaaatgcactgtcactgagctgcactcccagataaagtagctgttgttggtgtgtgtgtgtgtgtgtgtgtgtgtgtgtgtttgttgtttgtttgtttgtttgtttggtggtggtggtgtttttgacacagagtctcatacagagcccaggctcccctggaactcatcctgtaactccccaggggctgaggttccaggcacggatgtatcgcaccatagcccggacacttgattttcattgaattgtagaacagaagttgaatttctcatagttttgagaaacggggatctggactctaagatggtggtaaacatttgcagacactgtcatagctcacagctgatctgctggtgggattgcaaagctcttcactcaccgatggcccctctctgctgtttatttctagcccacctctgagctccgggctgctgacttctcatatctaagtctacgtgggctgtcaccaagaatcctgctattgtgtttgctgcgtgatagggcgcattagtctatactagtttgcctaagccattattaagctagaacaaccctcatctcagccagtcagtcactcttgtctacctgtcagtcaccaggtgtggtccacccaggcctgtcctgtccctgtctgctgcttgaacgttctcagcacatttagttagtgactacagcttcactctgtctcctttctgtctcccttgtagtctgttgccaaagtggctttccggcatgtcgataggatcattttggtccagcctaaaggtctcctcaggcccgtcatcctttgaccccgtggcctgtgtgtgcctcttaatctggacatttaagacttgttttccccctgtgttcccttactcctgtctccgtgtcatgttttatttagatagcttcctcatttatatctgtgtctattcccactatttaaaaagctaagcggaacggctaagtgaaaggccaaggctaacctcaccttctccttgattctgactctggctgaactctgggtactctgactccttgactgtttagcttggcatgctaaccatcgtgtgcctcagttttctctttttaaaaaaaaaaaaaatgagaatggccagtatctttcttctcacagtttctcaggctcctcctgggaagactttctctgttgcagaacgtgagcttttccggctgtagtgtgggtatctgatgtgtccttgagctatgtgctttcctttacacatggccgtgtgaagctgatgggacccctgagaaccctgagctacgtgaggcttcgcagacgaggagcccacctgatcagggaactgggccaggtctccaggctaagccgagcaaacctcagcagcacagtccatccgctagacactcatcccaccccccaccccccaggggtgatgagtgctattttaaaggtggtgtttatttgcatatcacattgtaagttttgggggttgaatgtgcccaagatagaacagtctgatggcactattcccaaaaaagccataaggtcaagccgatgtgtaaatactgaaggtgtccattattaaatgatatcgactagccgccctttggaaccttattttgttgtgcaccatgcccagggtgaggatgggcaaagctgggttaagtagccacaaggctacctgattcattgattatgcatactcacttgctgtagagcacagtgctgccctctgaggatctgaggaacgcgggccctagcattccgaatcccagcattgggaggcagaggaaggcggatctattgaattgaaggccagcctggtttacaaagtgagttgtaggccagccagactctgatggaggccattgacagagtgaacacattaacttagtggtgaggcctgtggtaagatcgtatggagtaccaggggacagtcatggagactttgatcagattggaaagccaggaggaagcaggaagcagtcggggagaaagaggaaatagacatgctgccggggatagacaggtatgtgaggaatgagagtcaggaaacctgtgagaaaggaagctaccagtgtcggccctggggctactcagaggagtctgaactttcctctggttttgagcagtgaataacggtgcaagtcttaaagacagagtagctccatttgagaggggctgtgtaaggacagtagaggcatgatgctagcttcagttggacggtagctctggtaggagcagataggtcttatcaatcaatagactttagggattggggaggaatttagaaatcatctggcctgttatacttgctctggggtttgcagagaaattcaaacagagcaatacaagaaactttctctaaacctctttatgtctctgatgtgctgttttcagaggctagggcattgtggacattggtattttagttttatttttcttctttgaacttttcatatatgtatgttttgatcatcttccagaacaccctcactacacccgagtccactcagtggccacaggatgcgcacagatgtagggccttccactgaatgggtaccttgcgaggggccacatctctgaaaatgggcttttccttcccagttaggggttgggcctcagggtctctccttctactagtgctggaatgctgactggctgactggcttgatcttgtatggcagccacagccctgagttcaagaacacgatggccttaggtcaggaaaacacctttttacagtaacccagcctctgactcgaagaattgttctgtttgtttcttcacctgctgtgtttgccaggcctctgagggagaggtggtttagctgttctgtttagggccgtacagcgtacagtcacttgctctgttctttgatcagttgtggggctctgtttaacctccactctctgcaaaaagagacttctccagtgagggctaaggactgcactaaccctagctggccaaaagtggtactagctgcccgagcagggtctcaggctattctgttttaaaataagttattatttttatattggttgagaaaggggcacagggagggtttcagggcttggtctcaggttgtcacgttacacacgaaactcttcttggtcactcacttggtgtctttgcagttgggtttctctctgtagtccaggctggcctgggatttgtaggagtgagccaccacattacagcttctgggagagtcggggatcttagagaagtagacttgtttctggcctggagagttagacataggaggtgggtgggtggcttttgagttgaatcttaagagctgagactagctactcgagaagagtagtgagggcctgctgtgtggggggcctactgtgtggagcacctactgggtagagcggcacgtgaggcctaagttgtatgatgtgagtgaaactgggtgcccccaggaagtagcagtcatactcagaaatcctggagagctgtaacagctccagctgtaagcagcctcagtgtttttttcagagttgattgatttgattatgtaattatcagtattgaggattctgctttgcataaatatgtggtacaaattggcagaagttaatttaggaccactttggaaatccttcctaatcccaagctaaacttcatcctgattttgttttgtttggttggttttgctttattttttagtgaaatccaagcttgcagcttcaacggcagtttttaaaattgaatatacttaaaaccatatagtatcaaaatacactagtttggtccttacatgccaaggaatgtcagtaggaaaatattaagtgtctttgttttccataagtgaactactatgcttctctcaaggcagagcagaaatgcagagcagaaatgcagtctgtagtggacagcagcacttaggctgagctctgaggtgtttcagccggcattggctggggtaaggcaggttgccgtaggcagtgcagtgttcatacgtgagggggcagggggcaggggctcaggcagacatgccttgggttcattacgtgtttgatgtggaattaatttttggtcattgtgcattcaagactcttttactgttcccagctttgcatgttgcttttttcatgatttccagtaacgtgacctctagtttaaaaagttgggtcatggaaaaaccttaaggaaaaccatagaaaaaccttggtatgcgtcagtcccttgacgtgtcttgactacagtagagatgcggttagcatgaaatgtgtggggcagttgccattgtctgtggcatcgtgtgatgtcgtgtgacatcgtgtgacatgtagtttcacgtaaatgtttatagaataagtgattgcatattgtgatcgctgcccctccctttcttcctagtgtttttaccctaaattattttttgttgtaatttacaatatagtgccccctcttccaagtctttgaaccaatgttttattgattcctcattaaacccaaaactttgggccaggctaaactaaaagcaaaaaacagtatcaaggccataaataccaccatctttatgagatctcaatgattcatttgaagactttaccaagcctggtcgcacacacagcagtgcctactgactcagctagaaaaccgtgtcttgtctgcctcctgcagcagctccagccacggtctctctagggagtagaagctggagccgctgggttgggtttcgctgagtgttcagtagcttgactcgttcagtcctgagtcggcttcaaccctccaccagcctgtctgattccccattgcccatgactcttgagggatggaagcatccactgaagaaggtctgtgcccggaagagctccagtctttgttcctctgttctgccacactgactccccacccatctttccagtttggagctcagtttgttatctaggagaatgtgttcactggctcatctatgttaagggccttggcttttctgcctggggttgtgtgtgtgtgtgtgtgtgtgtgtgttttgggaggagttttccttcctccctccttgatccgtcccctcctaccctgcaaggtctcactatgtaaccttggtgactttcctggaactctagaccaggctggccttgaactttacagagatgtccttgcccgtgtctcccagctgctggggttaatggtgtgcacaatcatgcctgagtctctctcactctgtacaattgctccccttctatttggagtcagcctggacatttacttcctgtagtctctgttggttatgccttcagcccatgcctggaccactgtcttccacgttttggctactgtccagcctacccgagctctcagggtagaatgccattctctcggaagccttcccccctcccccatctcctgtacatgacactcactctcagtccaccagactgtattcttgagttagctcatcacatagacatcaggtcccacaggagcagagctgtccctaccacgtgacagcagacctctgacctcaaaacacttccctttctctctgtcccataagccagatgcatcctcactaccatctagtgcagtggttttcaactttccaaatgctgtgaccattttaatatagttcctcatgttgtgacacccaaccaaaaaattcattttgttgcaacttcataactgtaattctgctactattatgaattgtcatgtaaatatctgatgtgcaggatatctggtatttgacacctcccaccccataggggtcactacccacaggttgagaatcactcactgatctagctcctgccttcttacactacctccagctagagagaaaccgcctagtcctttcacagagaccagaaatcactagaaaaaataaggttacagcttagcatgtgtggtgaacagactgtccgtgcacagaccagtcactgatgttacgggccttttagtcagtagttttgcaggctgcgtggctttgtctgtggtctgtgaaatctaatgcctccatttgaaggctggcctcacacccctgtcagtgatgggttttgctcatgcttgtgcctctcaagtgatggaagaaaacgtgtccttgctggtgaaggagctgaccctgctctgtttccgatgctacctctgtgtgtttctgcttgcgtcctcgcctcatccagaggctccaggtcccttgcaggttctcaccaccgactcctgcacctgcacagttttgcctttctcggtcaccctgcctgtctccattccctgaaaggcctagctaggcttgtattctgtggcagcttccctaagcctggcagcaggagctgggtgcctgcctttgtactcagccctgcataggaagaccctggtcctgcggcccttccctccaatgttgagcctataaatgcagctgctgcagtgggcctgccaaggccactggggtcagaggcaaaagcctgtgttgcttagataccaggccacatctgtggcctcacttctgataacagtaaccctgattttaataggagagtaagtaagtgcaatcaaattagtaaggtagagtaaagatggttctgcggctcgctgcttactttgttcaggtcgatgcagggttttcccagaagccactcttgacactagtggtccctttccttctctgagtagctcaaggtcacatgttctgccctctgggttgggcatcttaccttaccagtgagtcagggagagaaggaatcatagcttgctgatggcatactagaagggacgtggatgctgcttgttatattttcacgttttaaaattattagtttctaaatcaatttgtttttcataattaaattgatgtagtgattaaaactagtgtttcccaaggaataggagtggaaactgttttacaacggctatggagtgttttggcattagaacttatttcctctggcaccacgttgcctttctacctgtctggagatggtattgataaagtagttgcatgtgccaccatgaaaatcactttaattgcaatcgtctctgcttgtctttcatctccagaaagggaaacaggattgaagtgagagccagtgcacttaggtgaggaggcagattgtccgttctgtcttttgccttttggtttgcttacatatacgttctgtgttgcagacagtgggctgtcatttacagtgatcagtacccccatgagacagaacccctcctgtcccaccccaccccaccccccagccatgctgcaagcatagactgagcacagccaggctgggttaggatgccaagagcgcctgcccttcactgccaagatgtcagctgtattgttctgtatcaactgtcaagattttttttttcgatcttcaaatcactgttttccctcagtaagctcgtgtacctggctcacaggcatcactctatgatgttctccaaactgagaaagcaaggagaaagtgttttgtgttggagaaactcacagacatctgttctgaggctgtgcactagtgcaaaccttctgaaactcacagacgtctgttctgaggctgtgcactagtgcacaccttctgaaactcacagatgtctgttctgaggctgtgcactagtgcaaaccttctgaaactcacagatgtctgttctgaggctgtgcactagtgcaaaccttctgaaactcagatgtctgttctgaggctgtgcactagtgcaaaccttctgaaactcacagacgtctgttctgaggctgtgcactagtgcaaaccttctgaaactcacagacgtctgttctgaggctgtgcactagtgcaaaccttctgaaactcacagatgtctgttctgaggctgtgcactagtgcacaccttctgaaactcacagacgtctgttctgaggctgtgcactagtgcacaccttctgaaactcacagacgtctgttctgaggctgtgcactagtgcacaccttctgaaactcacagacgtctgttctgaggctgtgcactagtgcaaaccttctgaaactcacagacgtctgttctgaggctgtgcactagtgcaaacctgaaactcacagacgtctgttctgaggctgtgcactagtgcacaccttctgaaactcacagatgtctgttctgaggctgtgcactagtgcacaccttctgaaactcacagacgtctgttctgaggctgtgcactagtgcacaccttctgagctcttactcatagcacaggggatgtgcgcgcccagcacagcaggacgtgtgtgcacgtggatgcacagtgtttcgctctcatgacactgcaaaggaatacatccccaagccaggagcgtgtgcccggggagatgaaaggtcacttgcaaattcttattttggggaaaagatgccacgtgctctgccttgcctttctattcactcctgctttctcccttctatccctccctcctctcccctcctctcccttccttgtccccatttctagtccttctctcctctcccctacatcccccctcttttgtctccatatatatgtatgtgtgtatatatctatatatatgtatatgtatgtgtgtatacatctatatctatacatatgtatatgtatatatatttgtatatatgtatatgtatgtgtgtacatatctatatatatgtatatgtatgtgtgtatctatatctatatctatatatatgtatatgtatgtgtgtatatatctatatctatacatatgtatatgtatgtatatatatacatatatattaataaagcatcttctttcttttttgtttttccaagacagggtttctctgtgtagccctagccatttgtagaccaggctggtctcaaactcagagacccacctgcctctgcccccgagtgctgggattaatggtgtgcatgaccatacctggcaataaagcgtgttcttaagtgtgtgttgctgtactgtgctcttcctcactgtcctttgaatgtgctctttgtgcagcaagagcgcattagctcatgcgacttagctcagggacccgtccgagagtgtcctaacgcaccggagctcccaccggagctagtggtgttttgacgaaaaagaactttgagattttgtgcccacacagtcatgtgaaaaccagcttgatattgttaagttgatcctgttggattttcctcagttctgtctatgtggctcgagccagcagggaagtggtaatgtgactctctcacaagtacctttaattataacatatttaacttctattattgctagctttactttcaaaatgatcagtttagtaaattttaaagtatttaagtgttcagtttttaatgtgtacttttaactactgaatacaggtgttaaagaaattattcttggggcttaaaagatggctgagcagttatgatcacacgctgttcctgcagggtactagagttagttcccagtacctatgtcaggcagctcacaaccacgtcaagggcagcctaagagaaccctgatctggaggctggagagatggatggctcaactgttaaaagcactggctgttctttcagaggacctgggttcaattcccagcacccacatggcagctcacaacagacgaaaattatagttccaggggatctggcatcctcacacagacagacatatatgcagacaaaacaccaatgcacattaaaaaaccaaaacaacaacaaatcccaaacaaccttgttctctttttgattttcctcttttggggggaggggtggtggtgatggatatttaagtttaaaaactaaattttcaatatcatttggaaataaaaccttgggggaagggatatcagcatagctcctaatacgacgattgtcaggcattttgtttcatttacattttcttttaaaaattgcgcctcacctttagcttatgcagattatatctgttatgtttaacctgccaggagttaattttaaatgacgttaaaattggatttttagatatttttctcatctgacaccatgaataatgtctttcacggaaaatgtgctttataaaacagcagaaaactaatgcacacagaacgcttgtttttttgccagagtcttacacgcctacctcagtgaaggacgcctggaccctctcagtttgctgcagtcagtagacttcgatcttgcatgtgtagtctctgatgagagggagatgggaaagtatcatgaaaacagtttttccttgctggaaagggcccagagctggggtgatgactgcatgctgaggacccctgtaccaaagctcctctgtattgcttttttttttttttgtatacgtgcacctttattccatattgcattgtcttcaaacaatttgatcatttctatttttaacatctattatatttacatgggtctctaattttatctcttgtttatttctatcaggtttggacactaattttttttttaatgatgctaatttctacaatagttactgctactttcttcacacctttgtgtgtgtcttggggtggatctctgtcagtctgaggccaactagggttagagaaaccctgtttaaaaaacagagaaagaaagaaagaaagagagagagagaaagagaagaaagagaagagagaaagagagagagagagagagagagagaaaccagagaaagattaatgtcattgtagcagtaaagttatttttaagtactcatttttatttttgaatttatcccttctcatggaatatctttgctttgtggtccttggaccttaaagttggctaaaactcgcttaaattacataatctcatttttattcaggcttatttactgttgacgaaggagagtgccttcgttttaatactaaactgctgctggtatccccttgatcttgctttctgtaaccatttaacccttaactctctggaagacaagtcttgccagtccgcctggttctgcgctgagtctgctccagggcagtgagctactgagaggttctgttggttctctttgcgccgactagtctagtgtttaccagctacgtannnnnnnnnnnnnnnnnnnnnnnnnnnnnnnnnnnnnnnnnnnnnnnnnnnnnnnnnnnnnnnnnnnnnnnnnnnnnnnnnnnnnnnnnnnnnnnnnnnnnnnnnnnnnnnnnnnnnnnnnnnnnnnnnnnnnnnnnnnnnnnnnnnnnnnnnnnnnnnnnnnnnnnnnnnnnnnnnnnnnnnnnnnnnnnnnnnnnnnnnnnnnnnnnnnnnnnnnnnnnnnnnnnnnnnnnnnnnnnnnnnnnnnnnnnnnnnnnnnnnnnnnnnnnnnnnnnnnnnnnnnnnnnnnnnnnnnnnnnnnnnnnnnnnnnnnnnnnnnnnnnnnnnnnnnnnnnnnnnnnnnnnnnnnnnnnnnnnnnnnnnnnnnnnnnnnnnnnnnnnnnnnnnnnnnnnnnnnnnnnnnnnnnnnnnnnnnnnnnnnnnnnnnnnnnnnnnnnnnnnnnnnnnnnnnnnnnnnnnnnnnnnnnnnnnnnnnnnnnnnnnnnnnnnnnnnnnnnnnnnnnnnnnnnnnnnnnnnnnnnnnnnnnnnnnnnnnnnnnnnnnnnnnnnnnnnnnnnnnnnnnnnnnnnnnnnnnnnnnnnnnnnnnnnnnnnnnnnnnnnnnnnnnnnnnnnnnnnnnnnnnnnnnnnnnnnnnnnnnnnnnnnnnnnnnnnnnnnnnnnnnnnnnnnnnnnnnnnnnnnnnnnnnnnnnnnnnnnnnnnnnnnnnnnnnnnnnnnnnnnnnnnnnnnnnnnnnnnnnnnnnnnnnnnnnnnnnnnnnnnnnnnnnnnnnnnnnnnnnnnnnnnnnnnnnnnnnnnnnnnnnnnnnnnnnnnnnnnnnnnnnnnnnnnnnnnnnnnnnnnnnnnnnnnnnnnnnnnnnnnnnnnnnnnnnnnnnnnnnnnnnnnnnnnnnnnnnnnnnnnnnnnnnnnnnnnnnnnnnnnnnnnnnnnnnnnnnnnnnnnnnnnnnnnnnnnnnnnnnnnnnnnnnnnnnnnnnnnnnnnnnnnnnnnnnnnnnnnnnnnnnnnnnnnnnnnnnnnnnnnnnnnnnnnnnnnnnnnnnnnnnnnnnnnnnnnnnnnnnnnnnnnnnnnnnnnnnnnnnnnnnnnnnnnnnnnnnnnnnnnnnnnnnnnnnnctgctacctggagggcttggggttgacctgatgagcgcacgtgcacacgctcgcgagcgtggcgcgcgagcgtggcgcgcgcgcgcgcgcgcacgcacacacacacacacacagagtctgggatcagatgggacaagccttctgatggagactgtcggaagtcctgaaacttagcaggtcgctggaggagagtagtcacaggctgctgtcatccctgaggcctgtggttcatgctcatgtcaatagggtatccttaggagttcacccccgccccaccctctatctttctacctttctttttctatgaaatcaacatttaaactcccacgagtaaaaacactaagtacctgtcttcttgccctgcctgacttgagcatgtgtcctgacttgtttatatgtgcctggcttgtttatgtgccccatttcacttgcttctccatcttggctcttgcttgtgcgcatgcctgtgtgttgctgagggtgcagcataagccatctacacatagagtgtaaatgaccagctgagtcctaggtctttggcatcactatctcgacacccttggagatgcacttaggatgggacctgctggcttctgagtgtggatttttgaggaaccctttccttgcagtttcctgtcagcgacagcattatctacactcgtagctgggatgtttttggcatttgttttcctgtcccaccagtgtttgctttcatcttttttttatcatagcattatcattggcaggtggtgatttctcggtctccttggtgacaccaagtatttttcatgtacttctttgccacttccttttgagaaatatctggttggattgcttgcccactttttgaaaaaaaggattaataaaaataagggctgtttcacaaatgcgtgttgtccttgcacaggggcctcgccggtctgtttcatcccagggttgtgtgtgctgaagtgaatgttgccaccttttaacattgagaaatcttgctttcactgttgagtgactgagttcgggacagtccctcgtgaagtgtttccttcagttggctggttgtccctaacgacagctcttccttgtgctgcatccctgcctcgttcctgacctcctcggtttcctgaaggcttaccctgcccacgcgcctgtcagtgcaggtatactttactgtctagtgtgcttcgtcactgagaaggaaactggagagacaggaatgaaaagcaagtctggtgatggacattgaaagtgagccttgtggacaaacagactaggggccgattgttttcaggttgtgtaggatcgacccagtctttggagagaggcagtaaaggtaacatgggaaatgggatatgaagggatggattctcagaagggggagagtgcagaggaagtagagggtgaatagggaccttatggagcaggttagtgatcccacactggttctgtgcagaggaaggaaagcagactgttaagaccccatacttgggggtttattgctgttctatccgtaaaagccagaaaatggaaccaaccagcctgtctgtcaggtgagttgagtaaagaaaacaggatgtgcacacacagtgtgattctgttgagcttctttgtaacatggatagaactggagagcgtggtcacgccaggaggaataagtcgtgcacagaaagacagtcactacatcttctcatgtagacaaggaagctgaaaggcgaatctcatagaagagctcctggagcgatccagggctgggaagggggagtgggaggaacatggagacggtgttcacaggtgcagtaagcgggtgggggtgggggataacttgccatgctctgtggcacaaaacagccatggctgacagcagtgaagtatgtagcgtagctactagaggcggttttgggtgttcttagtgcgaagcagtgctatgtctgagatgatgtgtgtggttaccatgacaatcatcacgtgttgtatatacttgcaggctgtcacactgtaccttgtaagtgtatagttaaaataaaaagtgtgagttaaaaataaaaaggttgtcttaaaatagacagtgagtgggaaaaggtgaatttctactggtttacacagtacacgattgatggctttaaggttttagtacatacagtagggtttgtgtgttctcagtcccgtcccccctccccctttcccatctccataccactggtgacaacctcgcttgcctccttggggacctctgcaggctggcctgctgacactttgatgtggcacgtgggcagtggctgtggctcgtctacgctgttgtgtcagggtggtgtttgcagatagagtgctgttcacttggagtctgagtttggcagaagtctggttctgctggttatttttcctgggagtcaggctccgtgggtgtggtgccaggagtgttcctggagtgacttgctgggatccagcctgaccagaaaagcagagcttcgtgggtggagccccagttgtgggtcttgtggagacggtccccaaagcagactggattctctggagggctccgggagcagggctggctaggaacttgtgtttaaagagagaggggtgtccagtttcaggatgcatagtggaatcctgagtgagagtgtctgtggaattataagttcagctcaatggggtcaccccaactttttgccaaagtacaccaatgaggtttataagcagcaagatgggaagattaaacctgttctaattttagtgccagttaagagctgggcagccagagttggatctgtttcccgcccggtacaggctctgccttttctaacgtgtgagtctctgcttctgtaaataagaaaaataaccctttctagcattatcgagaagattaaattgaacagcttgtgtggtaggtgcttggtcctgactgttcgtgttctgagattgttattgatatgtttctgttattgatgatcccatctcaaagccagcatcatccaagggagaccatccaggcttcataatgaaatcttttaactcgttagcaaagcattacagcccataatgatgcagaatgtgtttgatgctaggacacattaggccagagttaatgccacaccttgtcctattaaacccagaacagagcagctactctccttacgtgctagatagtgcccagacagagggccacttgtcaccatgaggccattgtgatccatgtagaagttaagttagttggttataaattgaagccattgtgtcccaaggcacttagttattctatgcgtagcagatagagaacactcagggtgtgtcctctgacatgggtataaagtttctctgtggtcaagtcaaaatattttcctgttcttctgcacccgcacaaggattggaaaaagtcaagctgttttctattgctgtagctcctctgataacgaaggacataaacagaatgtggctgactctgctgttgatcaccagggcttctctcctgcaggatgctatgtacacagttaggaaaccaaccaggagagtgctgtcctcttaaacacagaacacatttgacttcaaaagatcttagaccctgtctctctcttctctcttctctctctcagaccagatttacagttgcttcagagaattcctctttttgaagatctttaaaaatcaacagtccacatttcaaaagccagatgaccaaagagtattgcaatatacctttacataggagatattgtggatattgaagagaaaaaaaaatatggaggtttagaaatgctcagttgttgagagccttcgttgctcttccagagaagccaggctcagtttgcatagcccatcccaggtgcttcacaatcccccccagttccagctccaggggatctcgtgtctctggcctctgtggacacctatacccatgtgtcgttgccaggcataagcacacacacagacttataattaaaaataaaatacgtcttaaaaaaaaaaagcagtagatgtgatggagcacacctttaatcccagtactccaaaggcagagacagatctctgagttcaaggccagcttggtctgcatagtgagttccaggccagtcagaggtacagagtgagactctgtctcaacaaaccaaaacaacaagaaagaaatacaaaaagctctggacattctgtcctccatcactatgcggaagaaatagtttcctgagccattttgtcttgagtgtttgttaacggcagcccaggctggctgcagctgatctccagatggagggaatgctttagacggctcgtgtgtatgacagaagcctcgggaggaagtggcaagctttcttagacggctgctgctgtgctttaacaggttcagctcttctgctttttgtgcacaaggaaatatgtgatagcttttccagatcaggtaagctattctggaccatttcatttctgtcacctgccaggtagtcagtcttgtctttcagtgtgtgtgtgtgtgtgtgtgtctgtctgtctgtctatactgtgttggactttgtgaatttctgctgagcatggatggttttgataaagtaataaggaatcccatttgtacaactagctctttgagctgcagggagagaaggtcactcttgggcatcttattctgtactccctaaaaaagaaccggatgcccaggaaaagcatcttctaagaccactttacagcttcttttattccctgacttctctaggaaaggctacttacaacttctgtacacaggtagggtcccctctaaatctccttcattttcccatggggacccattggttatgccttggtggacttcatgttaatgtcaccactggctttccttcattgttacagggaatggtttttctgagagcttgggttgaatcttgctgtctggggagagttggagggaagggctcgcgtgagagcactgcagatattgctggggcctggagaacggaggcagttccatgcagaagtggctgcagatacggccctgcggcctgatgtcaggattctgccctttacactggtcaggacttaagcaccatgagcacctggctgcagaggaaccgcattcctgaaagaggctggggcttccagaggctgacgccgcctcagtctgttgtgggggctgcgccagtctgtggctcctgcatacagaagaccccatgcagagtcaagtggcatcaggaagggggtcacagagtgacaggatcccctccacatgtaaaactgcctctatttatttatgagacagagtctctatgtagcctgtggttggcctggaactccccacttgtctctacttcccctgagtgctggggttaagggtgaggagccccatgtagcatttcagaaatacctcttccttgtcactgtcagtggagttgataagaaattagccagagaataggaaaaaaaaacttttttattttttataatgcaaccaactttcatattttgttgccagaaacacctaggatgtgtcaacataaaaatactgaggatttttgtcacaggggcccgagactaactccactgaagaacaatgttctcggttgcgaaacccagattgaatctgcagtaggagctgagatgagggaaggtgacccacttactagggacaaggacacgtaccttgcactcactgttaggaaaaaagccctggaacgcttacgggtttatccctggtgtctttgcctgcctcttacggcccgtaggacgagattttttacatttgtcattatggctgaggtagttcagaccaccgtgtctttgaatctcaaagacattttattcagggtgcttttgtgcagtgcagggctccctgaagtgaagcaggaggatgaaaacccactccccatccaccccacccgctcccnnnnnnnnnnnnnnnnnnnnnnnnnnnnnnnnnnnnnnnnnnnnnnnnnnnnnnnnnnnnnnnnnnnnnnnnnnnnnnnnnnnnnnnnnnnnnnnnnnnnnnnnnnnnnnnnnnnnnnnnnnnnnnnnnnnnnnnnnnnnnnnnnnnnnnnnnnnnnnnnnnnnnnnnnnnnnnnnnnnnnnnnnnnnnnnnnnnnnnnnnnnnnnnnnnnnnnnnnnnnnnnnnnnnnnnnnnnnnnnnnnnnnnnnnnnnnnnnnnnnnnnnnnnnnnnnnctccccatccatcccacctggtctgcagagctgagggttaaataaatgaagctccaacggacagccggacagccgtggacccgagagcagcggagacaccagtgtttggtgatggtataagctctggggcaaaaggcaaagcacccccctttttcagcacacacccttattcatttttagttgcacccccagaaccaccaccatgtagatggaggatctggctgagtgtttgtttttatttaataaatgtttagccctgcttattggttagattttcttgtaacagttatgaatatttaagaattgagtgttttgagagagttgtagattcgaatgtcgctataagagagtaaaaatacacacagagagagctaaggcaggggctggtgggtgaggatgaagggaataggggaactgtggaattatattttaatttaaaataaataaaagagctagcatagagatcctaagtccccttcacctggtttcccaggggaagtgccctggagacactgacctggttcaatctggcatgacgtggtgccatcacgcaagtttgctttgattgccacatcttttctccttcacctctcacccttggcagccactaagctcctcttcagctcaggaagttggttattgcagaaatattatataaatggattgacttctttgactccatttaaatctctggacaatcaagtagattgttggtatatcaatagtgatttttttttaagtcttttctccttccaggtttcaaacatgaatacagagtatcttgattctctcctctcccactacccctggctgtccccaacatgtccctctcctaccttcctttcctctcagatttctcttctttatttccttctttccttcctgtattcattccccccacccttccttctctttttttaacccagaaagcgcagttgctgctgcctgccatgtctggaagtcatctcacagtaccctcctttggcctttacattcttttctttccctcttccatagtcatgtctcctgagctttagagagtggtgtgtcttctttagggcagagcactcacagtccctttctcagcacctaactgggtgctgcattgactgcagaaagagacttccctggtcaaggttgaaagcagcacttacctgtggctataagcatgactaattcagaaggcagtttgtccatctagcagaacagcagtgccaggttcttctcctgtcactcccaaggccttagtgaccactgctcatccctgaccactctcccatcctctgcccagagcctcaagcctttgacctgctctgttcaaccagaaagtggttggttgacatcataaccttcatgggctgttgttccagtagacataccttgtcaagctggttggtactcttgttcaagattcgctgctggataaaaccattgatgacgtttctcctccaatggtccaaagcactctatggtgttatgaaagctagccagcagaggagaaattttgaatcaattccatcttgatttctctaatgtccaaccaaagtgtgctgtcgtttcagcagtagtcttacagtctagctcttgggcaactaatgacttgacttgcttgcattgtttgggggcctccctgactaacaaatcatggcaagtatctcatgccagggtgtgtgtgtgtgtgttttgtttttaataattcctgggtaatattccacagaatagtcaatattgctgttaaactgcctgtccacccattaaagaacatcatagttatttgagttcaaagcttaccatgataaaaactgtatgttcgtgtttatgtgaacatactttttcacttctccaaatgttcaataaagtcattttggtgataaaatagtatgtcactgtggggcctctaccacagtttctgtaggtcatagtttctagatagaattttaataggtcttctcagtatttctatagttttaaatattacctagatgatggtctttagggaaattatattttttcagtattgatttctagacatttacgtaagtaccaaatacagtttaagcatttcctttaaatttttttagagttatttatctaagtagatataattttgaagtgtttcacgtcctgaaaagaaactccacacacacagtaggcactttccattctacctccattcctctcacatcccgccccacccccacccaccccctgcccctggcagccacgtttgtactttgtgtttcttcagtcaggttctgggcattgaatggaatgggatagctttttgtgtgttgggctaagtaacacatgccatgtttttctgtcccatcttgtcacagcacactttgttgatttgttgtttgactcttgagttgctttaactttgggctgatagaataagatatcgtagattttcatcctctcaagtgaatgtctaaaattgccgggcaacgtgaagttctgtgttgttccaaggacttcttaaactgttttccatagcacatacaccattacacagcggcactggactggagggtctgagtccggcagcccatagtttctataggtagaatttccagatagaattatttccagataaaatgttaatagctcttctcagtatttctgcacttctaaatatttcctagatgatggtctttagagaacttgtaatacgcatctgcttttatttctttagtattggtttctaggcgtttacataaataccaaaaaaagttgaagcatttaaccagaggcaggtatatctctggacatttgagccagcctggtctatatagtgagctccaggccagtcagggttgcatagtaagaccctgtctcaaacaacagaacaacaaaccgaacaaccacaaaacctcacaaatatcccaggttccccaacaacaacaaatatcccagtgccaatacccgttactacctgccttcagtataacttaccatggtggctcttacatgggcctgagctgttgcagcaacaatgcttggctggcctccttggtgctaacaaccacagtgactctgcttttgttcagagttccctgtgaacccaattgactgcctcaggcttgctgtgtaagaaggggggagaattgtgggtgtcccccccccccaagaagaattgctgctgttgtgacatagaatagcattgaaaacttttaaaatttaagatggaaaagtcttctgttttaaaaatagttcagaccctgctttttggcttaaagaactaacagccaggggcttctcatagaacttcacatcaactaggggagtctgcaggagagatggctgtgctgtgcaatgcatgctgggtatgtgccataaatgtggggcggggcagtattaggacacctaagaattaatgtctgtggtggtagagtttggtttcatttggagagatggttggaacagaagtggtcctccttcctcttggctggtaaaattacagcaaacaaggaaatgtgccagaatctgttgggataaaaaccagcgtgtccttgcgcctgctgtctaggctttgtcagtgtaatatgatacatggatgggatgggtgtataagcatcagcagctgtaactgtaagctaggacgtggacatttatttgttagattcagaggcccatttagagagcttttaccagaggaatgatcctgaacttctagggatggcttccagacatctgtgcttgaaggttctgggtgattgtgagtacagccaggtttgaaaagttattgttaggaaactgtgtgactccaggaggacaagtgtgtcctcacttgtccaagcttaacacgggcagtcacattcacatccaggttctctctaaaggtacaggtgtgaactccagaggtgtcactcttgaagagcttagacctaatcagaattgtggacaaatgaacagatagttgtattttaactaataattacattttatcaaaaaaaaaaaaaacaaaaacaacaacaacaacaacaaaaccaaacaaaccattttatcccagattgaagtacagtggaaatggctgggcagtggtagcacatgacataaatcctagcactcaggaggcagggccagcctggtctacagagcaaattgcaggacagccagggctgcacagagaaaccctgtcttggggcagggtttgggggaggtggaaatgatgatggagttggtaggtaaggccaagagaggatcatggcttcggtctcctctccggtaatgcattgcagagggctctgaggcctgtagtaccattgattttaggggagcacagctgtttggggggcagtgtacatgtggttgtattgtaatgtgttatcatttaaaattacgttaatcctgtatattctcacagtcagttctggtacctgctgtcttcattatcttagtataatcaagaagttggattgaaattcccaatgaggtcatgggctgtgaaacttgcttgatattagggctctgttattctgtgttgtagacggacggagtcacaggcaatggtaatgtttgcatcacagggcccgtggaaggctgtctggaatgttttaagagcagtcgggtgtagaacggaagacccgagttcagtttttgcgtgcatgacccctggcagctcatcaccacctctctaggtaaaatggatcttggcttgggacagtgatatccagatccatccatttgtagcttagcaacccagtccgctagtgctctcccatgtgatcacatggctggctggtagctgtggctcactgctattacccagtatgtcacactgactgtcaccaggccaggaaaagattaaagtcaaaaaacagtttcttctgaggattgttctcacaccaccagtatcaaagaacttgaatctttttggccagaaaggttaaaagcacttactgttcttttagaggacccaggttcggttctcagcacctacatcagaaagctaacagctgccctgtaattctagttcccacaccatctggtgtgagaggacgtctgtgcataaactcatgccaggtacacaaacatgcaaaagcaaaattgtcggtgcctccaccattttctggttgtaaataactttaaaagtcccacagtctttacatattcttaaaatttcaatctctttaaaatatccatctcttttaaaattcaaagtctttttacaattaaaagtctcaactgtgggctccactaaaacagtttcttccttcaagagggaaaatatcagggcacagtcacaatcaaaagcaaaagtcaatctccaaccgtccaatgtctgggatacagataagaggcaggtcagacacctctgacttacatctgctctttactaaggaggaaatggaccctgatctgcgtttttcacagagaaattaacaaccagcatcctcttagcattccagagacattcttctagagttttcttgcaggtctatgattcaaatattactattgcctgtgactccgtctacaatagtgaataacagagccctgataccaagtttcactgccccactacctcatagagaatttcagtttttgggctagctgagtccataaacatcaggtgtgtgtttgatcagtgttgagtttgtaatgatggtaataatattttacctgtgttgacttactgggtcacgtgaaggtgtaattatcctcatttcacagactggagatctaagactgaaagagtaactttcccaaggtcatctgttggcaagacaggcacttgaactcctgctggcttgcttcagagtgtgtgcccctcactactattgttcaattcccattggccagcaggtatctttacatatcactttctgttttaagaagggtggaatcctgtctgcctctgtcctgttactaataaagcaatctgcagctttgcacacagaaattcaagaaatatgttagcgtgagtcagctccatttcaaaagcctggtagcatgagaagcagccatggagcacagaagtaaaaccagtctccgtgtggccagatccccataccaatgcaaggttttcacattgctgcactgtagcttcgtgggctacagttaatgggtaattgtgagagggagttctgagtccacctgcagcagaccgatgatgctcacttatcagtgaggagtctgtgcatcagatactgtctcgttccaagcaacagagtgcgttttgatgaagcaaaagttatcaccagttctcggatttaaagtggaaatgaaattggtactgttaatgataaatttctatgacaatgtacccatctctgataactaagttgttatgtggagtctgtgttagagattgttaagaattcccctagaattgaattctaggaccattttaattgccctttcaaactgatttttcttagaatctatatatatatattatatatatatatatatatatgtatatatatttttttttttttttttttttgcttgtctgtttgttttttcgagatagggtttctctgtgtagccctggctgtcctggaactcacatagatcaggctggcctcgaactcagaaatctgcctgcctctgcctcccgagtgctgggattaaaggcgtgtgccaccatgcctggctatatattgtttttaaggaccaaaaaagcccgtgtctttgttctgagtagaaaggaagttcctttcagtgttgaaaggtgtgcacatatgtgcatgtgtgtttgtatttttaaagttgtgtcgtacctcacagaatgtttttgctgagcacgttgctaagaggggagcagagcattgaggaaggggctccctggaaaaaaaacgcctctgtaactaggattttaggaagctactgttgtggggtagtgggtcttcctcccactttcctttggaatgccaactgtgtcgtgcgtgtctgaccgtctgtagtatcgtgattgtgtactcccactttaaggtggtacagtgctgtgtttaatacctaatttgaaatagccaggttctgttgcttagaggttgctgtatgctgagggagcccagatagcagagcagatagaaactacagggaggcccctgctgtggggctggggggaaggagcaagggctgggaatgaagagagagagtagggaggggacttgcagacaaccccttttagaacagaactgggcatgtgggtaaacaatcctggttccctggaggctgaggcaggaggatgatgaggtttgaggccagtatgggttacatacagaccttgcctcaaacgaacaaaccacactgcaacgctagtaccacatatcacaacaaaaagccaggccagtggagcagctgccggtttagaaagtgttctccagccatgtgcagtctcctaccaggtcccctctgtaggccaatgtgtgcctgagtcccgaggacccactcgttcagggctccccgcttgccaagtgcatgctaaccagtgcaaaatgccctccagccctaaaatactgcctcccctcctccctccactaaccagcagcctcaggagttgagatggaggcttcacatttgaaacatctaatcttatttagtgcaaaggaattctggtggtggcaacattttaaacatgtttgtccccaaacactcctgttatatccaaacagtaggacggctttaccttctcagcggcctgatctgtgacttggaaggacagcacatccatgctttgctcttagttactgatctgagtgccggaatgggctggctgggctgcttttcttcaagtttctcggggggggggggggggtgcggtcagggtagtgatgggagttatgttctttgtgtgaggttagctatatatgtgggaatggaggcactaagctaatgtgaattatttttgttaacccaactttattatttatttaaatgccagaagttttgagagatttatttcattattgggtgaccttcgtatcctgaagcttattagactgttttcctccttgtgtccttgtgtatttttcacatttctgcttttgtttttgagatgggggtcttactatgtacagtgtgctggctgggaattcacagagcagcccagtgccctaaagctgtattttaacattgctgaaaagaattgttgcttattctctctttgggagccaatgttctcagcatagaacactaaaattcagggggcgcgtgtagtagctatggttatgtgtgcatgtgtctgtctgtctgtgtgtgtgttggcagccaacatagagtgtcccccgcctgctcaccctatgttgaccatcaaaagtcatggatgagcccgagtgcaggctttgagtgccagcctggcatcccaggtcataggtttgttagcccagctagttggctgttttagatgaactttgacagttcaaaaacagtggatggggtgagatggtagacagctaaacttccatgatatatttttaagccaaaagaaatttgactggactgatttcacagaaaaggagactgccagcctgctcctgtcacctttgcagccagaaacaggatttccagaatgcccctggcacagatgggtcaccaggcggcctggctgtgggtttagggcatcagctctcctagctgtgatgtagttttacacagtctggcctgtccagacagatggctgtatggcccgagcccctttccctgcatggccgctttcttgcttccttcagcaggtagactgtgcctgggagagctctggttccatagcctaaggaaccttagcagttcttgcctgtcactgtcataccaggcccattgtcaagcttctctcgcccttcttggcaccccaggggcgggggggggggggaagcagcaggggggaaccgacttgctgggaaacctgtcctgcataatctttctttttttgtttttccattttttattaggtatttaactcatttacatttccaatgctataccaaaagtcccccatatccacccacccactccccctttttggccctggtgttcccctgtactggggcatataaagtttgcaagtccaatgggcctctctttccagtgatggccgactaggccatcttttgatatatatgcagctagagtcaagagctccggggtactggttagttcataatgttgttccacctatagggttgcagatccctttagctccttggctactttctctagctcctccattgggagccctatgatccatccattagctgactgtgagcatccacttctgtgtttgctaggccccggcatagtctcacaagagacagctacatctgggtcctttcaatataatctttcattctttgaagatgcttcgtgtaactgtgatttaattcacctgggcttgcactacattcgaagggagctagtgagataaattgggggtaggttttctgcaggagcagggctgggccgtctttgggcgtgggatttgtttgcccttttgggttcaaagttcacagtatttcacgatgcggtggttctgatctttctttggactcaggcataaggattctaaattctaagtagtttctggaagtgatgtagagggtgtgctgctggactctctcctcccctcatgctctcctcagctgtcttcataaatataagggagtttgtttcgttcattcactcattcattcattttggtgttttgcctgcatgtatgtctgtgagggtgccagctcccctggaattggagctacagacaattgtgagctgttaggtgggggttgggggtgaggggctgagaattgaactggaggtaaatacaggggagtttctaaacagaatgccagcaccagtcagttttccatggtgtgatgtttaaaatgtgacacaataatatagtagcagagttgccaaaagtggtctagaattttatagtgggaagagacacaactgagactgtctgctggcacacctcgaagtattaaagtggaattcttacattgcctcgtggtacacaccggttatcccagcacttggaaggctgaggcagggaggtgaccagtttgaggccaacctaggcttttttgtctgttaaaaaggagattgtctgaaatctgttctaatttaccagcccctgctcagttgtttaatctttgttcgtgtgttttatgtgtgatcttgaactcctggatagctttagggtactctgatggttggaatttcaaaaaatggattctgatacgcctggctgtggcctgcagtttccgtgaggccctccaggttgagtgaaggtcagagaccccaagttaaaaggctgttacttaggtgtagtgtctgcagggtctagcttctggggagagaaatccattctcgtcatgtatttcttgtctatgttttgggagctgggcagatcaaagagaggcctgttgcttgctccagaggatcaaagcctcccccagagaggaggcctggcctggtccccactagcaccatggttcagagtggctgtgttcccacttggcccagcacgcttgagaatcgtgtctgtggccttcacagcttggaggctggaaactgcggtaggcaggcaggggtaggcaggcaggcgggccggctgcagacctgacagcatgattgaacattcttgtaaattgggtcatggcgttcccataattccagatgactaggcaaagtgtcaagggttctccggggttctgtacctatgtgagagtatatcccaaaggctacttcagcagtgggtcagtccagcgtggctgggaagacaccccttatactgctgctgtggcagggcagatgaggctgtgagggagatgagactggaaagggcgtagtgctgcaggccgtccacggccagcgtcggggatagagggggtgtgagcagctaaggatgggcacccctcgtctttcccaaggcattagccacatgctccctgcaaggtgtgccatttgattgccctctgtggagcccggccagatgcacccaagcctgggagtcattgtgcttctctgaaaggggtgcagtgccctttctcgtgatggacacaggctggctcgtgcatgtacacctgctgtctttgggtcagaactccatttctgaaaacaaggtccatatggaggttcattccatcccttcacccggctttcttcttgtgtaacagtgtctcaggtttcatatatgtacctgtcattaatacagttgtttctcttagccacgtggatgtactcaggacccacctcaaactgaatgcctgaagccagaggttatataaaagcttgtacacactaagttctgtctgtctgtctgtctgtctgtctgtctctctatcactgtctctttcatacacacacacacaaattttcaccttctcacataaagcacactttaagaggcttactgtgacatctccaaatcaccagcatcagtgttttttaagatcattagtaaaggctgtgtgaacagccaggctgataagtagatgtcactaactgttcgtcccattggtagcatgtagcataatggggatacgctggacaaagcagtttgtgctccaggcagggttgtgtgggttgcacctctttcctcggagtgctgtacagtctaacaccagcctaaaacgtttctgctgttttcagtctaatattctcgagctgcagtcaactgcaggtcattgaaaccgtttagatcctgtttgtgtgtagaatgttttttctcccggaccttaaattctgtcttctgagctgttgtatctctttgggttttaagtcctccgtgcctggcacctgatgcagacagcaagtgtccaggtataaatgaaaaagaaaaatgaatggtgtggatgggtgatagctgggcagaagcgtggcattgtggttgtgagtgatacaagcctttggtgacagcctgtctttgtaccttagaggagcagcagccgtagctgtaaagagtgtatagacacactcagttgtgggtgtgggcgtgggggaagatacctgccttgtcagaatcagcctggtgagtcatggctcaacccccacttcatcactggggcagcgagcccatccgtggcatagatccctcttgactctcgccatgtctgctctccaaagactgttggctttttccactgttcctaagtttgattgagaaaagttctgcaaacccaggaggagagtggtgcagctgagaaggaaggcaccgaaagaacaaatgtggtcctctggcaaagtctcctcctgggtgtgcgtttgaagagggacccccatgtgaggcagctcctgcaggcctccacggcagagcagtttagacaggttatccaggccagacactgtcttcagttgtctccagatactaaacccacaagtctttcctgaagcccactgctggattcagtactcttgactgaaatttgaccttaggtttttctgcttttctctggccatgttagcctagattctcaaactggattctgtcctaggctgctgtccttggaatcttaggtcattcagagcagttccaggaacttactttttttcccaatccactaatggctctcctccgctgtccacccccacccagtcggttagccttgtatattttaaagcctttctatgctcttgtttccagctttcctgtggcttctgcttagaaaactgaaaagccttagttaacaaggagattgaacgattcttgtattgttccctctccgggaactgttcctgatgttagaatccagaacgctgtgacttgaattttcttcctactgtgtagcattaaatgggtgtgtacagctaccaggaggtgtgttccaacatctgctgtgcttcagacctgggtccttgtgccctttgggcacatcatttgttctaggtgatgctgctgaacatctgtccctgtttgcactctcctggacatgggaggcaatagatccttgatatttagttaatgttttcatttagctgttgatgttttagatagtctcttaaatcttccaagcttctctcttgaagtattacccatcccccatgccccgccctttccctagaggtttggcaatacttagaaatggttttgaaggttttcagaagaactggaggcctcagtgactgattctgtgtaaaacagtgcaactatatttgcagcataactaaacacacgattgtgaatttgataaccataaattaaagttacattaaatttaactgaattgtttgtgtgtgtgtgtgtttgttttgagacaaggttttattttgtagcccccgctgacctggaactatggctagcccaggctagcctcaagtcagtttgtcttgcctcagatgtatgcatttcccacacccggcgcagtatcagagtcctaaggttggacaccttgactcacgactgtgatcagtgctaaattnnnnnnnnnnnnnnnnnnnntgctaaattgactcggtcatttgctattggatttacgatccaaatttacaaaaatgtgtttatcgtggcctttgtgtgtgtgctccaaaggagagacctttctggaacagtttattcaagcacttccactggcttccttccgtttagagctgacttgattggttggaggacatgatgtttaatattttaattttttactgtgggcatgaagtatttaaagtaaaaaacgaaggtgacaagtaattttaagcagggagcagagtcagacagggtattggggagtacaggtgactgggggagggtaagaggactagcaagacgagaggcagcggggaagggtgtatgtgcatgcgtgtgtgtgtgtgtgtgtgtgtgtgtgtgtgtgtgtgtgtgtgtgtgtgtaaataccttaataatggcatcagggggtggcttaggctaacaagatggctctgcaggaaaaggcacttgccgtcaagtgtgacaatctgagtttgagccctgtggacccacgtgataggaggaaagaaccaattcccaaactcatcctcagacttccacatacataccccccacacacacacacagaatattttaaattatattgtatataatttatactatgtatagcctaagtgtatttaatatagacaatatatctggtgacaagcaaggacagttcctctcctgctgttttcagtgtccttcccctgtgggatggatgtctgccacctttcaatccagttcttctttcacaccgaggtctagcaccacagggaaggctgctctggaactgagaagagaagtttaggaaactgggacttggttgggttttttgggttttgtttgtttgttttttgttgttttggtttttatgtgacttcataggctgcaccgctgtggttttcagcgcgcacagttgcatgcgtggaggggtggggagcagctttggtttcgcatgaggaattcagcctttgcctttgcaccgttgaaaatggcttgttcttgttctttcaggaaaatgcgtgtaagaagtattttgagtagacagtaatcaatgtctcctttctctttaataggttttaaaatggaacatttcgatgcgtcactcagtacctatttcaaggccttcctgggcccccgaggtaagctggcttctggtttagctctcatctgcggctcccctcccatctctttatagcctctcgtaaatattgcatgaggtcttggaaattgttttctaagatgagatcaaaactttatctccagtcctaaggaccttgtgaagttctctgttagttgaatgctgtcccctggctctcgaggtggagaccttatggctgtgccatccttctgccggctcagcttccatagtgcagcccgtgaacgccagtgatttcacagtggttgatggtggtacgatttcctgagatcttgactctctagaggagaccaagccggtgcattctgaacacgcccagtgtgaggacaaaatgctctctcccttgcaaagttctgagggctgctgttctctacaaactgggtcttgacctattgcccaggccagccccgaaccccttagatcctcatgcctcagctctcccaagtgctagactctaagtgtctgtgaggcaccacagccagacagaagtatatgcatacagtgctggccatgaaacccacagtgtcatgtgtgaggggacgtgcgctgttgttgtgctgtaatgcaataagcccacaggactttactcttatttttaaatttaagtttcaaagaattatcgtttattttgacatgtgtgaattgtacacacagttgagcttcgttttggcatttccacgtctacagaatgtatgaagttcttttccctccattaccctctcctttgcccctcccatcacccgtcagtttccatatctctaatagtgctttaaggattttttttgtttttttaagaccaggctgacctgcctgcctctgcctcccaagtgctaggattaaagctgtgtaccaccactgccttttttttttttaattaacaaatcatttcacatcatgccatatattcttcaaatcccttgctatactgctgcttttcattatttgttcttttagttttttttttttgaagtagctatgcatggccttttagtattctctataatactttctttacaaaagaacttttcaaggggttcacagaaatgtataaggtttccatcaccaacaaaataacctggaaaaccaacttaaaggaggaaagctttattttggcttctgggttcagaggggtccatccttacctttctgggccggagacaaggctggccattgttggaagagcatggcagagtagaaccgtgcttctggatgcaggcagagtgtataaggacagagacaggataagctattcccttcaaagggaagccgtgttgatctgtcctctcccgccaggccccgccttttacggttttcaatgtctcagtagtccagtcaaggatgaacaagtgacagattcacccattagtgctgtcagggatctcatggtcccttcccccaaagccctaactaggcagctgcttgtaaactgcttcttatcagaacagaggactctcaggttcactcatttttaagatacagaaaaaaaaaaaaaaaaaaaaaaacgaaaaaaaaaacaacaccaaaagagcttcatcagtgggtgaaagatgaaaggtgtttgataccatctgccgtaagaataagggtgtggggcgtctaacctggtacagcctctctgcctctgtggcaggtaaaatgcgcggtctttaaactgtcatcctacagtgtcatcctacagtgatacttgatcattttgcaaagatacatgaagaatgcccttctgagaattgttaagaccaggcatcaggtagttgcccatggagaaggagcaggttagactagagggtgctctgttgaaagaacaggttacattggcagtgctggctcagacctgtcatcctagcacccaggaagcggaagcaggaaaaccatgggtttgagagtagcacaaatcatgtaacaagttccaggccattccgagctatactgtgagagacagaaaaagaacaatgaaatgcctttgcatctgcctgtgttgaaacagtgccttcatacttggttataaagagtcagaaaattcagcctttagttgtctgaagtaataaaagtgataagtgctctactttgcaaggtagaggagcccattgcaagggcactgtggccgtaaccaagaaccctgttctttgtatttttccactttgccattctcatccgtcctcaagatgaccaccttcatgattccagtagctcaggctgttcacccaccacaggaagaagatggttgttcattgcataagctggagaaaaaagaaagcttagtggtcacaattaccccaacattccatttctgcacgagaaaccacacagagcagtgatccgccatggttacctggatccttaggaacgcttgccctggggctagggttgtgaccagctgctatgggtgctcttggaaatacacaatacaaaagaataaggtgctgagctgaacctttaagtaaaggatatggaaattttataggtaaatacttagcttcgctagctggtaagtgaaaacgttactttctcagcatatactgctaaggcccagagctgagatcaaaaggtgttaggggccccttccttgtggtctctggggccagccacttccctgaaggaccaacattgccatccgccactactgtatcataactggtggcgtggggagtagaggcagcagctctgactgaaacaagtgaaagcaagctgcggcggactggctggacggggtcaagtgtctgcatagaaggaagactggcatgtagttccccaaagggagcgtgttcctcttccctgcgaggccaggggaggagatgagggcgagagcgaggccgtccagtagagcagtggctggaggctgcttctagcatgcgcttgggtttcttccctttctttgtcctgcctaggagacggggtaagagtggggtgtcctctgagtcagggtgggtctctaccctaaaaacatgagctcaggggttctcagcctgtgggtcaggaccctttgggaccaaatgactttttcacaggggtcatatattagatatcctgcattatcagatacttacaattcataacaatagcaaaattacagatatgaagtagcaatgaaaattattttatggtagggggtcaccacaacatgaggaattgtattaaaaggtcgaagcactgggaaggttgaggaccactgccttgcatagtcccgagtctgatcatggccgagccaatagtggtccattctttttactcgctggcctctattgctggctccccagtcagacccagtgtccctcacctggctgaagggcacactgcttgtgcctgcacgtgccgggcactcactgagctggaaggcttttgaatgcaaactaccatctcttaagttttccaattccacattaattcagtaagcataataaacttagtgggtagtttgactttctattttctttcagattctttgaaagcatgtttatattattttacttagcgtaaacacaagtaataaattattctaaacctgtatcaaaagagctttgctttatttgatgtatatttgtatgtggtttgcttttattgtattgcccagactaaaggcaacatgagtgtcaggtggctttggaagtggtctcccttatgtgttgacgactaaatgttttccttctgttggttttcagatacaagagtcaaaggatggttcctcctggacaattacatccctacgtttgtctgttctgttatttacttactcattgtatggctgggaccaaaatacatgaagaaccggcagccgttctcttgccgaggcatcctgcagttgtataaccttggactcaccctgctgtctctctacatgttctatgaggtaggtcagtggctctagggcttccttccacggagctgtgctgctgtggccgcctgaggtgtgtccctacgtgaagaaaggcatctgtttcactcgggagaaagagggacagcgagtccgttaatgcattttaagtaggttttgaagtggatctttataaaccagatgtctgtacagatgtcccctggaatacctcaaaggagaagctttggttgctgagtttttgtcgctcgtgttttgtgtggcacactgagaactaagctaaatagcttcaaaaacattcttattcgcgtaacagataggctggaaaacaaaggaaggttgaagagcggatctgggtacattttattattaataaatgcttgcttctcgtgtggaggaggaagtgggtgggacagtgggaaattctgtggcaattcagcttttgttttgatctggtaacttgtcagatctcacaagttctgtttttaaagtgtcgctgtccatattcattgcgcatggcactcttgtgtgggacactgtgttgtgtataagctgattttagaagctaggtcacgtgagtggtaagatcctcatttggaatcttagatgggtgtgtgtgagtttgggcccagtcattctttcacgtggctagaatgttttggctaaaaggcaaataatcagagtcaacacttcagttctcctccctattttgcaagggataatgatacagtccgtaaagccaggaagacagggaatgttgtccctcattggtcagcatggttcatctgtgtctcttggaaggactctattttccaggctcacattagccttttgctaaatcccctccatacagagaattccgatctacccacaaaatggacgtattccgatattcttaggtgttccggcagcttcagttctccggggaggtggtagagaaaagaataggggaggggaggaggggcctgtcgtggtggcttccaggctcatactgctcagggatgggagctagtagaaattgccatgaccactggaggatcccctccagcagaaggatgtgctcgtccggtcctgcccgtaccctctccctgggtagagatgctcgcctgtgagaacagctctgccatcgcttttatgtttaactcttagagaagtgcttacaaccagtttggtttcctatttttttatttttcttttttgttttctgttttgttgttgttttgttttgttttttcttttcttttctttcttttttttttttttttttttttttttttctgttcctctctagaatgaaggccctctctgctctaagatggagagtgcaggcctggaggcaggagccgagtgtgtgcatgacacctggcccagtgctgggagctgctctcctgctccagggacagactgcagcagccgtcgggttccagagcgaacttttctctcactaatggaacagtgataataccatttctttaacgaagcttatgtagagcttatagactttaatattgtacatagtatattctagaaacagttcatttaagttgattgacttttggagagcctcagtgtgtgccttcagtgttgcatgtttcacaagcccagatgagatagttatagtgtcatttaactttgtatatagatatctccgaagtcacgagaagaaaattgctgtataaactggcagtttgtgcatctgatttagggacttaccaggcagcctgtattgaaagcatnnnnnnnnnnnnnnnnnnnnnnnnnnnnnnnnnnnnnnnnnnnnnnnnnnnnnnnnnnnnnnnnnnnnnnnnnnnnnnnnnnnnnnnnnnnnnnnnnnnnnnnnnnnnnnnnnnnnnnnnnnnnnnnnnnnnnnnnnnnnnnnnnnnnnnnnnnnnnnnnnnnnnnnnnnnnnnnnnnnnnnnnnnnnnnnnnnnnnnnnnnnnnnnnnnnnnnnnnnnnnnnnnnnnnnnnnnnnnnnnnnnnnnnnnnnnnnnnnnnnnnnnnnnnnnnnnnnnnnnnnnnnnnnnnnnnnnnnnnnnnnnnnnnnnnnnnnnnnnnnnnnnnnnnnnnnnnnnnnnnnnnnnnnnnnnnnnnnnnnnnnnnnnnnnnnnnnnnnnnnnnnnnnnnnnnnnnnnnnnnnnnnnnnnnnnnnnnnnnnnnnnnnnnnnnnnnnnnnnnnnnnnnnnnnnnnnnnnnnnnnnnnnnnnnnnnnnnnnnnnnnnnnnnnnnnnnnnnnnnnnnnnnnnnnnnnnnnnnnnnnnnnnnnnnnnnnnnnnnnnnnnnnnnnnnnnnnnnnnnnnnnnnnnnnnnnnnnnnnnnnnnnnnnnnnnnnnnnnnnnnnnnnnnnnnnnnnnnnnnnnnnnnnnnnnnnnnnnnnnnnnnnnnnnnnnnnnnnnnnnnnnnnnnnnnnnnnnnnnnnnnnnnnnnnnnnnnnnnnnnnnnnnnnnnnnnnnnnnnnnnnnnnnnnnnnnnnnnnnnnnnnnnnnnnnnnnnnnnnnnnnnnnnnnnnnnnnnnnnnnnnnnnnnnnnnnnnnnnnnnnnnnatttcagttcctttttctagaactagcatttgtattctgtgaactaagaagacacagtagggcagccatgaagccttaccggctacgctgaggaggttgtgaggcccttggggtgcagtgtcacgcacgccagtctctagttaccttcctgcttccgaggctgtaaggaattgtttcttttaagcaaatatatagtcattggtattttggtttattaactacagatgtgccttgacatgttctgaatcaatacaaggaaaagtaatggccacaaaaaggaaacacagaagtcttcttaaacgagggggaccaggaaaggaggggagccgcagaggcaggaagggagcggggtaaaaacaactgaagcaattctgaaaatgacacaaggccaaaatgtaacgggagtacaggtatatttatagttggtgccttaggtagggaaaggaggctgtgtgtgtagatacctcattgaccttaggtttatctcccggcaaaggccaggcaatcctgggctttcagtgtatttgagatgtgagatgcattagtttgacagtatcgggtgtgtgaggcttcccttgttgatgtaggtactgtgacttagttaggtgttagcccttagtgactccggctgctctgacagaagctcaggaagctacaccctcagagagcgtgtcacctgactactgacgctgtctgtccaaatatctgtctgtcttggtgaggagcccgcgatgatgaattctgatcatcagtttgcttgattgaattaggaagcaccgaggccctgggttctggggcattgatgaggcatactttagggtttgttcacagagaggtccttctgggtggcagcatccatccctgacctgaaatagaaatagggcaggagaaggtcggaggagtcatggccttcctttctctgactccagagtgaagcaagcccttctgaccaccacaggggaacaaaaattctctgaactgagccagaataaacccttccgcccctcaagttgcattttacaaggtaaaaggaaccaatacaaacccgggccttcaagttctggagtgacttgcccttattctccatttctgcaccagctggccccgcgttccctgtccccagctgcttctgatccttcgttactgtgctacgcacggtgttcctctcaggcggctgctccgctccgacctggagctgttttgatgtgtctgctcctttcccattctgcctctgacctccgaggccctgcatggagagaatctaattgtctgctttgatgtagtccaaagggcacgctagtcctgctcagtctaggcctctcacgctgatcctggactctgcagcagctgtcggaggcaggctcagggctgtacagtgcctttgctttggtcaccctagggctgctcctatggggagatacgctctgtgctcccccaggctctctggctcagctctgcctaaacccacagacaccagctctttgagtcttcctccctgacaccatccccagcctctttcttcggtatctctgttcccaagtgaagtgcctttgtggtattccatcagcaccccactccagcccaggccacactcacagacagacaaatgcctgcaatgcaaaggtcccctctacatctcctcattgttatttcagttgtttgcaccaccgaagctgtccttgtataggaataggaaaagggtaaacatgagagtcacatttttatactatttaacaatcagacataagttataggttacaaattattactttttgagtgtgtttttttctctggtacatagaaccatatattgtgaaaaatacgaccaaattgtctttcaatcattcagaacatttaaaattgtatgtaaaaaaaaaaaaaatgtattcccaagaagacagacctggtttggcataaatccgaacttatccatttctctcttgctgtgctgggtttacatacgcatgcggctatgcctggcttgctcatgggctccagggatcctaactcaggtcctggagcttatgcagctctctttaccagcaaagccatctcctcatctcctgaattggcttcttaaggaactgattatactcagagctgagcatgaagaagtatgcgtggcctagcagttgtccttggctagctagcaagtgtggggtcagcctgagacaatgagaccctgtctcagaacaaaacttaaaaaaaaaaaaaaaagccctgcgactgcccctctgaggtcctgcttttgaaataatgatttagcctatgctaatttttttttttttactttaaaacagaagtgtttgttgagtgtcccagataaggatcccatattagcatttctggggttatgttgatgtgcctgtcttcccccaagtgtctgagaggttatagaaaaacttgagcacagacttctaaagaacaagaatggggtagggcaaaacaagctcggccttcctggttggcgctgagtgctgtggagttgggtgtgcgtggtgtggatgtgtgctccacctggccagctcctgcctttgttcaggttgccaagagctcacactgctgctttcttgaattgtgctttgaaaatcatggtgttttattgggaagatgggtgatgtggcctttgaaaggctgctccctgagccggagcctcctgtcctctgtaattaggggtaggtaagcgcctcccacggtacctctgggctctgccttgctcaagccccagagcagttagctcctctggaaggattatattccaaactgtctcctttttcttttggttcaggctttccaaaatagataatgttcttgtgggaaaatgggctttggagaaagtattttgtttttagaacactttggaaagggtttttgctctttgccttcctgcttaaggagggtgcagagaagttgactcaactggagagaccagtatttgtaggcaagctctgctaggtgtgtctagcctcttgacatcgtaacaagacattgtcacctacaaagttcacaatattgacatcattaccccacccccacaccccccaccccacccctgcagtgagagaacgtttgaacatttttaagtttgtggttttatgttggggtttcatagctatcttggggtgcacagttgtaggttggacattcctgggtcattgcccagaataggtgatactttgttccctcacaactgaagttccttgcttagaagaactcccctgggcgatctgaaggagatagcatttgcccctggtgtggctggagctcctcttggggattacacacagtggagaggagaagtggggagtacagtccaagcaccccctccctacccctcacccacctccagagggaggaagggaaagaataccttggccaaagaggaagcctcggatctcattctgcagactcctcagacctctgagaacttaacttcctactgaagtaatgaaggatgtgggaagacacaaagctccccccccccacctactccctctccctctccccctctttccctctctccctcaagatacctccgtgttcctggctcactttgagatagaatacctctatgttcctggttgacctggaacagatatcctcctgcctctgcctcccaaggacagggactaaaaggtctgcagctccacccaccaccccatcttacaggttcttagttaaagccaggcttcgcaaagcaaggctgcagtaggttggctgtagagtttaaactcatgcaaaggaccctggcaggggctcctggttttgccccagttgtagattctcaagtattgggagcagaaatgccagagttttagctacaatatcagacttacatggtacctactaaatgtcgtgcacctgtcgtgtcctcatttaatggtccccttctcaatgtccctgtccctttctgtggaggaagtattaacagtaaaaacaaaacaaaaaaccttcagcacaagagggaaggggccagtacttaggattccaggcatacctgtttcaggttagcctgtttgctctgtgctaagagttttgtcaagtgtgcgggagcggtccttatgacttaagcaagggaggtgccttcctcgttccaaagtggccttacactgtaggggaggtgggtgcttttcacttcggaatagcttatggttggctgtaagtcagacaaggagatcgctacaggtaaaggtctttttctcagcatccttcctgaaaagacttgccaacaattcagaaacaggcatggtaggcagcagagcctagaactgctgtgtgacacatgcttgggcttagccaggccttttctttgtctctgtttcctcacttaaagtgctcacttctaccagatataaaaacatacacaggccagcaaatctgtgaaatgtcttaatggctctttggaacattcctcatctgggatgccgttgtctttaagcatcgcatcggagtctgttttcattgcctttggtttgtctctgttcagggcatgatgtccacataacttatctacctcttatgaccaaaaccagccagcccttctgtcgttttagggctttggggtgatgtgacggggtgatcggaccatgaggatagagcttttccaatcagactcaagtgtttttgatgaccttgtttctggaaggctttggtagcgatccagaaagtactatggtgaaggttctccttcatttgtggttagcagtcagttctcaccactgacgtcatcagctccctgagctgcgtccccaggacctcactgtgatgcacagctatgttctcttaagatgaaaagatgcacaaaacctgcattggctgctgagctgtctcccaaggagagaagaaggctgcttgctgcgcttaattatagctcttcacatgttcctggcctaattaaggtttgctttactccaaggaaggaggaagcacatatggctttacagtggcactgcccgtatcttggttacttggggacagccacataaataactctctctttgttgtccttgggccagttagtggtacagcgagtgtgaagatagaagcaggctgtttgttgtggcctacttttccactctggaacagtctctccgctgcctctcggaagcccaaggtagatggcggccctcttctcagtacctcaccccgtccatcctcttgagccttcttctacctcgtctgaggtcctgcagcattgtgacagaccaggttgccagagaaaacttgaacctgggccctgcagagaagcagcagctacaggaactttctaggagcgtcttctcctgtgtgctctttgtagggctgggaggggctctcggtcctttgcattgagagtctctggggccactgctcatggcatcccctgttcctctgacagtaacggaggctggagaagcttcaagtactggcccatttgtggagacttggtagagacccagacaaataaatgctagcccaggtccatagcttggggtattaaattattctggcctttctgacattttccacacacacacacacacacacacacccctataaaatttggtaaatggttttcttcttataaacagaattcagaagcctgtcataaaatttgagcctctttggaatacttttggatattttttaatttctctgtctgcaaagcaaaaaatgaacccacctccctccctccagacagaactgatgtctctgtctcctacaaatgtaacttgatacctagttcctatgagttgtgacccccagcagagtcacataccaggtattctgcatatcagatgcttctattattcataacagtagcaaaattacagttatgaagtaacgatgagatcattttttggttggggtcaccatagcgtgaggaagtgtattgaatggtggcagcattgggaaggctgagaaacactgctttagaggactttgagcttctgtcttagtttcgtatcgttggtcagcccgctcctctttaccagtctgttgatgtaagaccaaggcctccccagagcttactgaggggcatgagaccctcatggtttaaagtttcctcatggggccctcactacactatctgtgacgtttgacaagaagcggttccgtttggtatctcgagacactttgcatttctgtcgtgggacggaggaaggacagtgatcagctgagaaaattaagagaagccatgagaggttgggcttccagtcatggagaaaatagaattctaactgagcttcggaagataggagatctggagacctggggtgcctgggacagaattctagatagtaggaataaaacagtcattgtgaatatttattatgctcttgttaggagccttattggatgagataaactgttcacagttcatatcaccaacctttcaagataacctttctgatgcaagaccatgtctgtgccgcttgagttgtgggacctaaggcttaagcagatggagacactaaagccagtgtccctatctcagcatagacgttagaggctaatgcagccctctgacctcgggggttaaggaaatacggatctggaaaactgtatctggataagtagcttgtaggtatagaagtgaaggggaaacttggaggctcactgtagaactggaatacctcagaaggtttgttatggaggcaacagcaagtctttgaaaggttttaagtgtggaatgtattgcattgagaggctccctagctggccctagtagaagcggtgagtggcagtcccagtggagagaatgtgaccctgaaggctgcctccacaaggacctcagagtggaggaggtgtggtaggcacaggccaggagcatggccaccagtgaacagcatcccctgtatgtggcttgttggtgctggcagctcaccacccagggcccaggcctgatttctgtcctccaaaggtggtgttaacatagagatttttctactcctgtcccaggctagaggaaagggcaagtaggattttgagttaatttgcttatagaggagagttctacctagattcctttagaaacaaaaatgagtcacatgtcaggagggaaccagagccttccttattaagaggcacctgcaggactgactgtaaagggggcatctgcccgctttcctaccagagtcgtctgaagcgacatacacatggtcctctggtccaggaccccaagatggtagctaaagaaaacagtgatggtagggtccagaatgtgacttgtattgttgcttccgtagttttgagacagagtctcactatttaccttgtctggtgttgaacttgttatatagaccaggctggccacaaactcacttagctctgcctgcctctgtctcccaaaggaaattaaaagtgtgcgccaccacaccctgctaaaatgtgacatttttaatatggtaaaagatataacaaagataaccgtttcagcaaatattcactgtacacatttgtcctcgtggaacccttactgcattatctgtgacattttgacaagaagcagttccttttggtatctcgagatattttgcatttctgtcatgggacggaggaagaactctggtgtcacaaccctctctccagtctggtctccaaaggcccaagcccacctcctctccctccgttccttgttcattctgggtttgcatcttgagtcttcaaagttctcataggcctgtgagtgacagacttaactggccttgaaagaggacataagacccaaaggatatatatgcctcatggtgccagtctagaaagaaagcagcagcgtgcatggcctgttatgcagtgtagctgagagatcgttgaaaacttggacagaaagccgctggagaggatttagtccaacttcacttttgacagtgaaacccacaggtctcacactcctccctgtcaaaccttccaacccacagcctccacatctgatggtataccagactcttaatgctgctctctggccatgaaaaatatgtaaactcagaatgttttcaggtagagaaagtaacagaagagaaggaaaacactggaagggaagttacaggaaacatcagatgctcccacacacacaccccaccccacccccgcattcatgcactgtgccgaggctggcatttatttctgacgtttgcttggctaaaaatgtaacgttttgctttccagtccttgtccaaaacgttctgcttgctgtggggcatctgtaccgtttaccaggctgagtagttgtcggagggcagtgggggagcaacctgagcctcctagatcctggctctgtttcagtttccaattatcgatattcacattgacccggcagagggggcggcactcctcgatatccgccccagtgtccttatgttttaatatgccttaaacagctcaatggctgggccacttctaacctccacttggctgatggaccttccaacacgtcacttacctgtgttccaccttggctgccctctcagactgagtttccccagcacctgcatgacagctgtgttctctgtccagcacctcaggcgtggcatctactccttccgtggcatggtggctatctttttctccccttcctcagtctcttgcccaggaatcctaaagtcccacctctgtctccctgaccagccattggctgtcagcaactttatttaccaatcaaaactaactgggggcagggtccctccgaattttacatgcacactgaggattcttgtgcaattgggggggggggattaacataattaaagtggcattagaccaaatctacaacagggttctcagttaccccttcccttgaacaactttcttactgaggtcagtaggtgaagttactggtttacagtctgagccgcacactgaattctcttgagaactttgtgagtcccgggaggtttgtttcctggtctgggtgaggccaggcattagtaatcctttagagctcccggggttatggtggtctgcagcttcaacgggacccgcagttgttttccaaatttcatatgatcagaatcagctgttaaaacactggccggctggcaaaatcacagccctcagaggccggaggcaggagaatgagaattttaacctaggctacctgaggtctctctgacacacacatcccatgtaggcttctcgctcataaatttcagggtcacaggatctagggtaaggcctaaagctgtggccaacaagttctgggtggtgtcagatctgggatcggagacaagactttgaagcaacatcattagattctcaagaatttgtgaccagggactcttgaatgccagccctggtgatcgaccccagggttttagatcctgaaggtttgtgatagttcaagattgcatcttgccaggggtcctgggtgctgctggcaggatggacaggtgcacacactttgataactgtgactgggtccttgtgtgtgcttcatatgtggatggcatgaagctcaaagtataccatctcaggcatcccctggcattctgtggccatcaagagcactcaagattgttctcgagtatagaagaaagcaagcaagccgggagctgtggttttcagagataaatagcacacaataggtggtaggaacatgattgaagtagaataattaaactttctagcctgtccgttagagtatgttctaaggtctcatcataggctatgcatcttaccatgggccaatgaggaaacaggctgtgtcactgagccagtgaaaactacagctttcatgcctgttttggggtcctttctatatctgcagatggattctgcagatggctaatctgtaagcctaggggtatgtattagttagggttttactgctgtgaacagacaccatgaccaaggcaagtcttataaaacacaacatttaattggggctggcttacaggttcagaggttcagtccattatcatcaaggtaggagcatggcagtatccaggcaggcatggcacaggaggagctgagagttctgtcttcatccaaaggctgctagtggaagactgacttccaggcaactagggtgaggatcttatgcccacacccacagtgacacacccattccaaccaggtcacacctattccaacaaagccacacctccagatggtgccactcccaggtccaaggatatacaaaccatcacattccactccctggccctcatagacttgttcaaaaacatgagtctatgggggccatacttaagcatagcataatgcaaaatgcattcagtccaactttcaaagtcctcatagtctatagcagtcacaacaatgttaaaagtccaaagttcaaggtctcttctgagattcattcaacttaattaactgtaatctccaaagcaaggcaggaaaccagctgggcaaactccaaactctgcatctccatggctgatgtcaaagcagtcttcagatctccactcctttttcatctttgttgactgcaacaaactgctttctcctgggctggttccactccctgttagcagctttcctcagcatgtatcccatggctctggcatctttaacatctttgagtctccaaggcaatttcaatgttacagcttcttgtttcagtgtctgggattccacttgatcttttggactcctcctaagagctggcatcacttctccagctctgccctctgtagcactctaagctcaggttgatccactctactacggctgctgttcttggtgttcatcccatggtactgacatctccaatacactggggtattccactccaactaggcttcaccaatagcctctcataggctctcttcagggtgccaagcctcaaatcctttgcatgaccccttcagtcctgggccatcaactacagctgaggcttcaccttctccagtggccttccctggcctctcacagtgctaagcctcagcttctctccatgatcccttcattccttcacaagcaggtaccacctgagtgactcttacacattaccaagtccatccgcagcatgaggtacaaccttcggtatctctggaacacagcttctttgtgctcccagaaaacaatttccagaagatttcacctcagtgatgctggtctcttcttaatcactgctaattccttagctccggctaactagcatcaacttacccagtagttccttccattcttaactctagagccagagctacatggctgaagctgccgagttctgctgcttacaggaactagaacatgatcaccttgtactattatattatcactagctttatgttttctaaatccttcactgcccaagcttggctatcctggatcttgctctgtagattgaccttgaatgcagagatcagcatgcttgtctcctgagattaaaggtgtgtaccaccatgcatggatttaatctagctgggtagaatcttgccccaaggtcccactcccttaatctgttatctcctagaacacaagattttgcaccatttcacttcctggtacccctttaatactcgaaccatatattttatattttttctttctaagcttgctatgcttgttcaaacttctcttcataagacttaaccagagaacaaagtctctgctgggctttttagaaacttcttttgtcaatgcaattaatccaagtagcttcaccttagcctcaggcagactttccagacaaaggcaaaaagtagccatcttcttcaccaaaataccacaaaaacagtctttatgccacatactgaaattcttctcctttgaaatctcttgggccaggtcaacacagttcaaattactcccagcaactaagtcttccatattcctactaggatggcccattaagccccatttaaagcattccactgctttccaaatacaaagtcccaaaatccacattctttcaaataaaagcatggtcaggcctatcacagcaataccccactcccattaccaacttctatattagttagggttttactgctgtgaacagacaccatgaccaaggcaaatcttataaaacacaacatttaattgaggctggcttacaggttcagaggttcagtcctttatcatcaaggtaggagcatggcagtatccaggcaggcatggcgcaggaggagctgagagttctatgtcttcatccaaaggctgctagtggaagattgacttccaggcaactagggtgaggatcttatacccacacccacagtgacacacccattccaaccaggtcacacatattccaaaaaggccacatctccagatggtgccactcccaggtccaaggatatactaaccatcacagggtagatgcagcatcaggaaatgaaaaggaataagaagatggactatatctgtcctagtgttaaaagtgtgtctccagtccaatggtgttggtggccatcgaaggacttgttagaactacagatccttgagcccccacccacccttggggagtccatgactgacttacacacatggctccaaactgtacagtcaggtttcaggagcccaggcttagggaaagtgacatgaggagatgggatgacatcttggagttggatggagctttacctgaaacagcaggtgaaggagttctcaaggcagcagcctgggaacgtcttcaggctccctcttcacccttccagtatggtgactggatgaacgcatgtggcgttgaagacttctcttcactgttcactctgacgatgaacctcactctgtagagccccaagttaatcttctcatactctaggctaataaagttctgtggaacggggctctgatgtagcaactaatttttctcccctttttttcagttggtgacaggtgtgtgggaaggcaaatacaactttttctgccagggaacacgcagcgcgggagaatccgatatgaaggtattgtttgagggttgtgtgggggtgagggtgtctgtgtgtatttgcttgttttgtttttgataaagaacatatataaaaggcgaaagagacagcggcctctcaatcctgataatccctgttgtcgtttttcaaaagagagagaggcgctgggtatgcggtatggtaatttgaacatgaaaggcataaataaaatgaaaactaaatcctcccctctgtaaaagaaactcctgtggaccgttgacaggtttcatagttacataaaagaccatctgatttaaagtcactcttgtaagtgccctccgagtattgatattaaaggtaaaaccctgcctcagtccagtctgagaattggagtttgttaaacagaaggctggcggtcaaggctcagcatggccagcgtttcctttgagcatatcagttggaccagaaacaggtactacacactctggttccatttccttcctgactcgtgcttccgctggccctcaagccccagcatccttctcccagcatccttctcccagcatccttctcccagcatccttctcccagcatccttctccctcccggcagctccgcagacttcagaagagcactgctgagcccggagctgcctgccggggcttgtggttttgagttagttttgctttgagacagagtcctttgtagcctcagattctatgtagctgaagatgaccctgaaccctcgatccttgggcttctacctcttgagtcctggggggtgcaagagtgtcaggagctttgaagacatttcagttctcccaggctctcaccgtggctggagctgtccctggacggcagcgggggccagtgggactctcccaggtttacatccagggtgacattccagcaaagtactggagataaaccatgagccctttgctcttagatcatccgcgtcctctggtggtactacttctccaaactcatcgaattcatggacacctttttcttcatccttcgcaagaacaaccaccagatcaccgtgctccatgtctaccaccacgctaccatgctcaacatctggtggtttgtgatgaactgggttccctgcggccattgtgagtaatgggatgtttggggaacatgtgacagagacagactggaaacttagtcctcgggaaaaaacgtcctctctgtaaatcctcaggttaataagcttttgagtttgttttcaagtttttctttttctatgtattattattattattattattattattattattattattattattattactattatttcagttagcatacactgtaaagatttcattgtggcattttccctgtcagtcacacttttctctcatttgtccctctccccaccttctcatggtctccttccttctgcttttcatgtcacatatgttagtaatgttagtagcaaagtaatcctaaccagaaagagcaaggctgaagacttcataaggcccagcccaagattatccacagagccatcgtaatgagaacagtagggcacaggcacaaagagggatgtgtagactaaaaggggtggagtagaagaccagagagaaagtcacacatctaccacataaccattgacaaaggtgtcagcagatatgttcatcgttttaaaacagaaaatcacaaattattcataagtcaatggacgattgaactcaatacacagttcatgaaaagaaacccaaatgcccaatgaatactttaaaagtgctcagcattttttagctgtcaggaaaaatgagattcccgtctcacttcaatcagataggttatcatccagaaagcaaaccatcaggggatgtagctcagtgacttggccgtatcagtgagatgctagatccagtatcagtagaggcagaatgctagcaaggatccaggattcatactcatccctggtgctgctccatacgcctggtgctgctccatacgcctggtgctgctccatatgccaggtgctgctgtggaagtccatttggagactcctcagaaactgaaccgaaaactaccatttgaccttgctgttggctaaatagccgaggactccaaatcacataccacagagatacaagcacattcatggttgtggctgttctcttcccaatggccaacaaacggaagcagcctgggtggccaagcacagatgataatgtacgttgcacagtggcattttatgcaagtgtaaatggtgcaggaaaatggaggccgctggatatcatgttaagtgaaattagccaaactcacgtactgcatatatataaacctaaatataaaattgtatatgtgcatgatatttatatgtaggtcacaaaactagaaaaagtctggtgagaggggaggaagagatcttaagggaggtaggagattgtgtgggcaatggagtgtgtgtaagagcggaggggactgctcacgggggaggggaggactttacagggaaggacactgtggggagggcagcaagtgatatccgagcagcaacaggaatgtacggagactccgtgatgaaacccattactttggatgctaatttaagagttaaataagccaaaccccttcaatagatagttctggaaaaattacatatccatgtgcaaaacagtaaaacaaaactcagacctctcactcagcacaaaatccattctaaataggtcagagactttaaagaaagaccagaaattctgaacctgccagaggaaaccaatgacttcgaggtacaggcctttatgggcagggactttgtgaagaggacctagggttgcttttagtaatagtttgtgttacctaagggcatagagcctttctctggttattgtcctactctgattaagatgaaggagatgccaccttgggcacattgagaagtaggaagggagcaggcaggtaaaggtgcttactgccaatcctgatgacctgcgtccaatccctggaacctgtacggtggaaggagagaaccaaccctcacagtccgtgtactgtctagtgggcaaggtgtgtgtcacggggttaggcatttgtggctacacattaggaagtccccatccaatctgatggtgtgaagttaccaggtgttttttcataacttttgccaaaatttgctagtttttaaaagttgggcatggttgggttctacttagggtccagcaagtatctctctcggtcactagtgttttctcctcacctgaagagtttgcctgggaatctctgggtctgctcccaacgtagctgcagactgtctctgccctctgagattcagagctctatcaggttcataactgaaaaagattttctaaataccccagaagttggctgagttccaacactcttgaactagtgtctggtgttcatcccttgtcacctatgggtaagctggcccagattctggtagggaccgccctccacctgattgcgtctgaggagtattttaaatttcaagatacctcatgagacaactaggcccagctggccttcgcagagctggagagtgtacacgacctctgtgagggctgcaggaccagtttctgtcatagccactagacactcctaacacaacctgaaaagctgatggcttcgcttcgcttcgttagttactgttgaggatgaaagtatttaaaaaatgatattctactggaaattaaaagaggtatggtaaaacggatctttcgtctctaaagaactgcctctaaaatggcagcccatcttaggcatttgggaggaggactcctcccagtctgccggccacacctgcaggtgccaggtctggggcacaagctagtcatatggcaggtctgtggaccactgggtgtaaggtgtcctatggctgcctgccctgcccacccagtggaaactgacttttcactacacagccaagtagcacttagagctgctgtgtttgtcaccctcttggttcagaagagtcactctagttccaaagtggtcttggattttcccacacctgttccttagaaaactctaatgcatctccctcggtccctttgttcccgcagcatattttggtgcgacactcaacagcttcatccatgtcctcatgtactcgtactatggtctgtcctccatcccgtccatgcgtccctacctctggtggaaaaagtacatcactcaagggcagctggtgagtgcttggtccctgtgcccagaacttgttccctgccagatccagtcctcttccaggccgtcctgttgtttaattgaatccagttgatccagttaaacttgtgggcaggtaggcaatgctcttgtttctagtagatggagaatctgctctggactgggggggggggggtgcctcaagtcttaagctctcaacttcaggtccagttttgttctttctttgtgtgtataagtgcccacatagtgtgcacacatgtacctgtatgtgtgctctcacttccaaactgaagatgaaaactgctcacctttgttcccaggagtttcaggtagaactttctggtgctgagtccagagcccttgtatttactagacagtgggccctctcgggtaaggtgagtgccaggtgactactttattctgacccctgtatcagagtactgggtcgaagctcctgctgcctgctgcttcagaccctagtggcccttggcagaggcagactgacaactgtctgtcttgatgatgattcttgccactctcccattgtgtggctgctcctttcccctcgtgaagccttcctgagcagttagtagtactcttgataaacaccggcctgctttgttctgtatgtcaggcacccatgctgaggatatgatttctgcatgagatgtctggaatattccctccatgttgtaggtgaacacataaaggctgagggacagaccaccacccagccttgccatgggcatttgttcccgatgaatctaattgagatcccctgaatcaaccttgatttttttttttttttcaaaatttaaaaataacattttgaaacgttggagctccttctgtgtctggtgtttcattatcacctctgccggctgctctgcagtccttgttaatctttttctcacctgtggggaaggataattgttctctagcctcctctgatacagaggagcaaggatgcagagatggatggatttatgctgtaatcatgggctctggaagacaccgtaggcattgacatcctgctgggctgtgtgctgtctgcctagctcttagattagaactccagactgaagaaatgaggggaacggagcccgtgcgagcctcttgagtcctcactgggcttctgaaggtgcttgaggagtcaggggcctttaacacctttgagtggatcatacaggtccacctgctttccaagggtcgctcatcagaagtcattcgtggacctagttattttggcctatgcgtcatgagtgacgtcactggcccctttaaacaagtacctcactcctctctcttacctctctatgctgagttctagactgttagagaaaggtggtttaagtaggtatgaggagaaagggcgaacctatagtagaggcatacacagagaggacagaaataaacgtcatataaaaagctaggaagtgctggttcagaaacttgggtgggaacactgatacatagccccatggttggaaccatgtgctgccacggctcaaccctggcctttccccctaggtccagtttgtgctgacaatcatccagacgacctgcggggtcttctggccatgctccttccctctcgggtggctgttcttccagattggatacatgatttccctgattgctctcttcacaaacttctacattcaggtaaatctcaccctccgctggcctctgaccttcgtcctttcactcagtggggctgtgtggagcactgctggtgcactgctgggagcactgctgggtgctggcactgtgctttgaaagagcctttgtagggatggagggtgggtccacagcttgctttgccatcgggtcctaggcgtcttgagacccgggtgggaaatgatgccatgtttcgtgggtgctttgttccctttctttgggcagtgcagagacataaagagctgatttccaatcggaagtctcagccccactgccctgcctaccatagctaggaaatttccatcacattctctgatgtaattggaacctactgttttgtcccgtttttcttagatggccattgctcaagtttggggcttgatagaggtttgtctatctggtggcgcctggtcaccaggcagacactgatgagtctcctgcttttgtggccagtgccaagtggcttctgtccccactgtcccctgggcaggagcaagagcaaaggtaacgggtcccaagaaaagtccagtagtgtggacagccaccaggaggagactcagctgctgtttgtcttctgtgcccccgacgtagctttgtgtgacttgttgactcctgctttgccggggcctgataataggaccttcttccaattgctcctggtgcccattgtactgtacatgatggttactgaggcaataagaaaaacataaagataagtaatggcttgtgatgtagagtggctactagccaggaggagaagccagtttggtcccctaggccattgctccaccatccacatcctgaagaggcaaagccgaatgaacagaaactcggtgttctaagtgtttctgttgtggtctagggggtcagaacctctgagctaagcctcaaaaagtcgcaagggtgattgaacataaagtggttatttgagcacaggaattacatggtgagactgatcagaccaggaaaccaggcctagtgagatacagaccggtacagttcatctgggtagcaggcactgattcgccttgtacatttcagacttacaacaagaaaggggcctctcggaggaaagaacacctgaagggccaccagaacgggtctgtggccgccgtcaacggacacaccaacagcttcccttccctggaaaacagcgtgaagcccaggaagcagcgaaaggattgacaagccgagccgaagcctccagaccgcggcgtgtgattgtaagcacagcgtgacttgtgccctgacgctcatagcagctgctgtcactagtctggccctactatctgcagtgtgactcatgtaggaccttcttcatcagttcaaaacccctagaatatgtatacagattatacaaagtaggcatacgattttctcacatttctgggctctcatcgacccccgcgctagactgtggaaagggaatgttcttgtagtatacaacactgctgttgccttattagttgtaacacgataggtgctgaattgtggttcacaatttaaaacactgtaatccaaactttttttttttaactgtagaccatgcatgtgattgtaaatttgtacaatgttgttaacagtagaaaaacacacatgccttaagacttaaaaaagcagggcccagagcttgttagtttaattagggtatgtttcaactttgtattattcatttgtaatagctctgtttagaaaaatcaaatgtatgatttatgaaacaagtgtgtgatgtgtaacttcaagtgacttggagatgcgaaatctgatggcacccttggttttataacgatggctttaaataagcaggctcaagtctagtggaacagtcagtttaactttttaacagatcttatttttttattttgagtgccactattaatgtgtttaaagaggtggggaaagggtccaaagcgtctggagacacttacgtacctgtccctggtcccccagaggctagggtgactataagagtaggtcacttttcacttctgaagtgcttagtgtttttatacaggagataaaaaggccattcgacttcccaccacttggagagagagaactacctttcaggaaaggtgacgagacatttattatctgacagacacacacacacacacacacagtgataagggactggttacctgggtccacatttttttttattcttttctgtagtgctactttgacatacacttccttttaaaatgtgcctaatttaccaagagaccaggaagcaccataagcattttgaggtaaaatttaagagctggagcgcgcaggaactgggtgtttgggagcaaccgcttttttcagtgtgaatcatggtggcatctgtaatttttttctgattagcacctaaagatcggtttaaagtgcttggactgcttatcctaaaatcgtgtctagtgcgctcgaggcatcggtcatacaaatggggactcttttcatgtgtgtcatttttaaagtgttgaaagcttagcctttgaataccttctgcattggtaaaaaatccatggaaccactcatggcacatcttaggagatgattgacaatgtataaactaattgtgggtttgatatttatgtaaataccagtttaccatgctttaattttgcacattcatattacaaggagccagttggtcctaattagccttgtgggttttctgtttggaaggagttgcggcatctgtttacatttcccttgtcagatctagaatgtgtgtatgtgtgtgtcttctccctaggtacccgtctgcaggtgtctttacatatctcaatacaaaaattataacatttgatagtgtgctgtcaaagtgtgcttagctcatctggatatacccacactgttaaataatgtctaaacattaatcattaaaacctttttgattacccgtgctgtgtcttctgttgtttgatgtgctgacagttctgaaagactgcaggatggtcaactctgtcaccttgtaggagcttagggagtggacatgagtaatgtagcgtggaaagtggttgtatcagttgggggctctctagagaaacagaactcatagaatgagtgtgggggtggggggaggatttattagaatggcttacaggttgtggtccagctagtccaacaaggctatctacagacagaggatccaaggatccagtagctgtttagtccacgaggctaaatgtctcagctgctcttcaggaaacacgggttccagagcagtcgcgtcgaatgccagcgaaggatttgcttgagtggactcactagcaagagtgagaacaagcaggcaaagagaagagggcttccttcttctctgtcctgtttagagagaggctgccagcagcaggtagggcctggattaaaggtgggtttctacctcagagatccagatctcaagtgggtcttcccacttcagatgattaaggaacaaaatccagcactggcgtagtcagtttgagttgtagtcagttctgcatgtggtcaagctggcaaccaagaattgctatcacctcccatggcagaggaccccagagcataaatctcagtgtcttccaacaaccctagctcctcccctgcacccctgctagagggttcacctctgagcacgctcctgcatcctcctttccttcctggcatcccatgctcttccctcatctgcagactgttagagtaacttctcgttgtaggcagtaggtctgcacatttttctgtgaagagcaagagagggagcactccagtttccgtggaagctactcatctgagccattgtagagtacaaaacagccacaggcacgaaggtaaatgggtgtggctgccttggaactctgtgtgaaaaaaaaacagaagacccgtgtcatgagttgctgagtctgccggagacaagtgcgttccctccttcatcccaaagtctcatcattcacacacacacacacacacacacacacacacacacacacacgccggagacaagtgcgttccctccttcatcccaaagtctcatcattcacacacacacacacacacacacacacacacacacacaaatggttgcttttccaaatcctgcccctcccaacctacctgaggcttttatgtcctatccacgcctctgggaagcaggtgatcttgaatgcttcatctctcacagtgacactgatggcttacggcttaagtgccccatcctcctcccccccccccttcccaccacagctggaagtacaagctggagcttttgtgtatgtaaataacagcttacaagatctcctggaaaacacttaacactagtaaatggcacgttaaaggatgaccaaggggatcattggagattggctaatggtgatagaatcaaatcagtatttttcccttaagtccagaacaaaagaaaaacataagacacagaaatcagagtaataaaaatcaaaatagccgagtacgtaggcaatcaggagacagggtcaggaagatgatggcaaatagggccagcctagagttacaggccaaccaggattgtatagaaaacagctttcatcaaaaggggaaagtgaggagaagacagagaagagaggttggagtaacaccgctcactgaaaagaccaattgttgagccacagtcaggagctctccctagctaacgagtgtcctgggctgaacttagggttggcatcaccacgggagtggtgacaggtttcttgggccttggctgaactgccactacaacatttgggaaggcaggtcctggtgctttcgtaggctcccccgttaatgcagattctcacctgctgaccttaacctcaccaacactgttcagtttcctctcctggtgttagctgtcagtctctctcctcccctgggaggaatgagtgggtgagggaagagaacaaggccaggcatgtgcctttcctgttttctgagttctcctgcgtgtggagacaggagcacctccctggcagccttcctactgtggaaggtggtgtagcctaatctgagaaacccaacttggggaccacagggcctcttagcctctaagactgggatctcctccaagtacccaattcatttctgccaagctcaagctgctgcttggccattcaagccccgattggctgccccaattaccctgtcacaaaagtacggccattctgttgaatcagagtgcagagacttacaatctcaatgttcgaaatctgcattcctaattttgccaggtttcccttgattaatttaaagttttcatacacgtatgcattacacattggccgtacaccctcatctttccactcctttatgcccccttccctttagtctgctttgtttcctagacagtgtgattcttgttgcataccatagtcatgactttatgtatctatgcagggaactaagaaacaaatgagaggaaggtaatacaattatttccagttacatccatttcctctataagtgacatgacttcgttattccttatgccaccccacaaaattccattttgtgtatatactacatttttaacacccaggttggctttgtaacacatctgtgtgaatggggcagcatgggatgcccataatctctgtcagacgttgacttggcatcttttgggtaaacacattggaggtgcattggatgtgcacagggcttttggtaggtagtacagccactatttctttcttcagtgttttcaactttcacttctttggatctttatacatacatacatacatatatatatatgtgtgtgtgtgtgtgtgtgtgtgtttgtgtgtgtgtgtgtgtatatacacacatacatatttggttggttggttggttggttggttggttggttggttgattgattggttggttgattggttggttttggttttttcgagccagggtttctctgtatagccctggctgtcctggaactcactctgtagaccaggctggcctcgaactcagaaatccgcctgcctctgcttcccgagtgctgggattaaaggcatgtgccacgcctggctggatctttatattttaaggtgggtgttttgtgagtgagattgttatcctgaattctttctcagtgtgctttgctttaggaaggctgttgattttattttctttcttatcataaatcactatattggggctggagagttggctcagcaggtaagaacactgactgctcttccaaaggtcctgagttcaaatcccagcaaccacgttggtggctcacaaccatctgtacagctacagtgtactcatatacataaaatagatagaatggagaaagcacatgcctctgtcttgatccattttactaaaagtgcatcgactttccccccatttaatataatggtggctgtaggtttgccgtataaaatctttatgatattgagataagtttctcttgccctcagctctccaggcattagcatgaagagaatattggataaaagccttttctgcatttactgaaatgatccttgcgtgcatttctgtggtgtgttatgtttgacagtttgaatattttgaattatttctacatcttcagaatgaagccagtgtgatcatgaccaaatgatcttttttatttgttcttgaattcagtttgcaagtcttgagactctttgactttattttcagcccagagattagtctgtaatcttcttgatgtgtgttgtcctggttttggcattgggcatttgtcacactcccctgttttctgtcacatgcagtactttaagaagtggtggtggtgtctcttccttaaaggtctgaaagaaatgagcagtgggtctctcagcttctggacttttttcttgggagatttttccttctagtttagcctcactgcctgtcacagatctcttgacttagctttggtaggctggcatccatctggaaattaagctgtttctttcaggttttcctgctattatttctagcttaagtgttttttagttttttttaaatttcattggtatctgttgtaatgtcaccctttttgtcgctattaattggactcttctctgggttgctttagataagggttcattgatctgtttatctttccaacaaacaatcatgatttttgttttgttttgttttgttttatttgtttcattgaatttctaccctgatcttatttctttccatgcacttactgcttttggattttgctgcgaaacattgtgtattctgcagcatttgacctatggtccatttttatagatctatttgatcatttaatacagatgtttgtccgttagtaaaattggggtagtggagatacttttatatgttagggttatctgtgacttatcatctaatagtacttttaaacgaaattgacaataaataaaaacaaacaaaatctaaccactgacctaaccgtctatgcacaaatgcaatgcaagaacacaagaaacagtaaaatctaagacactgtggcgtctccaaaaagtgtctcgatcccagagaaatgaccttcaatgaaagtaatttacatgaaactcccaagagttaaaaaatgattgttttttatatatagactttcttggtgtcatttttctctgctagactggtaatcaaagcactaggttcaatccccggtactctgaaaatggaatactgtctgggggtgggagggatcacttatcagagggtagacccactaaaaatacagtcgactagaacacagtcagcccttactgactagtgattttatgatataaagaacaccgataacattgtgtgtgccattttagttgctgcaggcatgatggtaaggggggacaccgaatcagactaatgactaatcctgggtttacacagaaaaggagaaaaaggaagtagggatagcaggaggagcagtaggcagaggagatgaggccatttgggctcaaggtagaatgaaaagtggtgaggaagcgtctgttgagctacaagcccctcaaactgcacaggcctctgttctttgggaaagctatttcaatgaggacggggagaagagaacaggaacagagccctcccacgttgacattggatgttaaatggtgttacataagggagaaataaatgtaaaagcagagggctgcctggggctgtagactgaacacatctgacccgtcagctggctcctgtcggagcttcggcattccttccccgcttgcttcccgatgcctccatgccctttcatgctcctctgtaagcctgagtctcagcattcaggaggcaagttacagtgttttcacctctgggctgtccggctttgtatggtcctgcactgatgctggccaggcctccaggggtacttcttcaggagtcttgttgggaatactggcacagccccaggcaggtcagggcaaggttggcttcacaaacccgtgttcctatcttcatcattcaccagtcagtgttgaccctgccccggggagtcattcctgctttgaggtgtacaacatgcaacccaaccaagtctttacgcccctgcagattctggcttcaaccagacttctaccttctcgcacgctacgtggtttttgttcaggttttcttcccagccgacttgggcctttctgctgggcagggtttggtgtatcatcctcgacactttgaatttgctgagagggcttacaggtcacaggctctccagacaccccgctgctgactctgcaaggggctttttaagatggtgcagcatggcagccccgtcaagagctgagaaaggggtttgctgacatctctcttccctctgactgtaccgctgttgctgtctttcctgttccccttctttttctcatctgtaagacgtcccttactggaagaacagattctctgagcctctcatctctagccacagttcccacggtctgtgcttggcacgcccgccctctgggagtggggcattccccaactgatgcagcccctagggacacattctggacttgcttttttaaattctcttatttttgccttggtttaaaaatccggagatacctgcctcttctaaaagctgttaccttattttgtctagtttatttcctgagaccggagcagaccctgcctgtgtgtcctgcttctgcggtctctgttcttttttagctttttctttgttttttatgtgcatttgtgctttgcctttgtgaattcacatgcatcgcatgcatacaggagcccacagaggccagaagagggaatctgaacctctggactggagttataaatggttataagcttccacgtgggtgctggaaatcaaacccaggacatgagaaagtgctcttaaagcactgagccctctcttaagtctcaaaacattcttgatgttcctaacgtctcctttgatctttggcaaacagggttgatgaagataagtctgatccattgatcacaatcgctccaatctgacagcaacactctggtcagatttcttcaatgcctgagatgtctttgacagaaactctgatatgtcccactgtcctcttggacctacctaaccagtttatcctttacacttggtggtttgagtgatggttccagtggagagagttgcagcatcagccgctgctctctgctctttacaccatttctctggctaccacctcttcctggaaaatgtaaagcccacgtttgtcatccttaattaattaaggtatttgtagatagttgttgttgttttggttttgcatttcttatgctaatttatttatttatttcttatgctaatttaatttatttatttattatgctatctttgccacagtccatgtaggacatctggacttggctttgggctgaggtcatagaagacacccaggatagaagttgtaggaacaagtcatggaggcagagagccagtgatgtggccacagttggtcttttctcagatgacctggactctgccatgttgtccagctccattgctgtgtggaccagacttccgtggttgtttactgggagagggtctgtgagaacttccttcagtccccagtggaacttttgttgggttaggattgagagtgtatacactgatgcactaagtgtaagactgcttgtggctcctgccagctcctgaaagtacagggagggagggctcttccagagacggtgatgatgagtgggttttcagatgagccttcagacagtctgggtttctgtatggagatggaggctggaggttgtctgggagccagcatttcaagtccaggaacctacattagcaaaagcgtagaaggcagagacaacacattgcactgaattagtgtgcgtgggggtgaaactgctagtttttaaaattaagaggggaaagtgagaggaacatggaatttgggtgttctcgtagatgagagagagaggtgtgtcttactcagccttgggggtgggaataactatgctctaaaggaatcattctgcccacagtttctgtcctcaccatctaaggaggagtgtacagttaggctgagaattgcaatggcttgtccatcagcagtaaactgacagaaggtttgtcagagacagaaaattcctcctaaagcaagagatggtattcggggcacccaaaagggtagaggataggtggtttgtaccgcgtgtaaataagccagtccccatgttgacttaagcaaggatttgttcagtgattctgtcaacacattgctgccattactggttgaaacagcggacccagatttggctttccattcatgagtttgacaaaggtttagccaagctagctagcacttctcagcaagcttcatgccttccactgtgagtctttccaatgaagttggttctcatgggtaagggtgcgtcaacaccaacacatctgggcctactctgctccctcagcatcacttccgagtcctgaggaagctgtgtggttgggttggccaactgtgaagcgctggctctctgccctgtgctacttggcgttgatgtattttaagaacaaggcccaaaagtcactgcatgcccttacaaggaaatagtcagaagccaaatcctgaatacaaagctgcttccttgaggagtggatgagagaaatcgggatggcccaggtgagatgtgggattgtatccttagtttagaactgggttgaaaggacacgtactagacagggctatccagtcaggtttggactcagggtccatccctgagggtaaaggccttgcttctcatccctgtggggatgtcgggagacttgccttgcttttttattcagctgtgaaagagatctgaattctgtagcccagatggctgaggttaaggcaggagacagaaaacttttaacacacccttacggtagctatcacaggtcatttcttatcaaatacaaagtttgccgggaagataggctttagttgcttttgcccaaagcaaattattagcctaaattatcattgaaatttagttaatatcaactttttttcctaaaggagtttgtatttctaaaaaaaaagaaagaaagaaaaaagtttttttttagataccttaaacttagatgactcacaatctgtggatgtgagcattgtctagtcatggatggattctgggaaacaggctgttcttacagtacaggcatgctacataattgtaaaggtgaatcagaactctggggtctactgtgtgagcaacggggttgcaggcatgttccagttctttccatcaacttctttctagtgcctttacatgaaagtcagaagagatcatgcatgcacaagcttctgacatcagactccaggcagcaagagataaggggcagagttcctggcctcactggtcagcagtcccttctggagttaacagagtacttccaggaaagctgcctggacaactaactgaaaaatcaatcacctcatttgtattaaataatttaaaatataatgaaaataaaatcaaattttaaaataacttttaaaaatctcttacatgtacatttgtatgcaggttcctgtgtggaggagcttgtgtgtgcagatatatgtacatatatgtacctgtgtgtatcaaggcctgaaggtgacattggacatctccctctgttgctgtctaccatatttggttagcaatggtctctcctttgaaccatagtttccttatctggttagcctggagtgctagtttgctctggggttctcctatctctacctgcccagatctaaaattacaggttatcataattacaccatgtctgcctggaatgggtgctgtcttagagcttctattcctgcacaaacatcatgaccaagaagcaagtttgggaggaaagaatttattcagcttacactttccacattgctgttcatcaccaaaggaagtcaggactagaactcaagcaggtcaggaagcaggagctgatgaagaggctatggagggatgttacttactggcttgcttcccctggcttgctcagtttgctttcttatagaacccaagactggcaccacccacaaggggccctactcccttcatcactaactgagaaaatgccccatagctggatctcatggaggcatttcctcatctgaagctcctttctctgtgataactccagcttgtgtcaagttgacacacaaaaccggccagtacaggtactgagatctaagcttggctcgctggcaagcactccaaccactgactcatgtcccaggcctatgcctttttgttaattgttctattttcaattcattttcaatattttatagactatgttttatggggaatcttatataactctgttacagcatgtttgaacttttggttctggttttggtttttaagagagtctcatgtaatgcagcccaggtagctttgcatttgtgtattgaaaactgaacagagggccttgaactttttgagggtcttaagcttcttagttttgggggggatttttttggttggtttttttgttttgttttgt

SEQ ID NO: 1129 - DNA, 2681 bp, Mus musculus
acgccggggttgaagctgccgggcgccttcctcttgcatcgcggctgcagcttgcttctgttcccgcgcccgcttgcacatcctcctgctcgcgcggtcctgctgccgtccggtgctccccgtagccgctcaggcagagaggttttaaaatggaacatttcgatgcgtcactcagtacctatttcaaggccttcctgggcccccgagatacaagagtcaaaggatggttcctcctggacaattacatccctacgtttgtctgttctgttatttacttactcattgtatggctgggaccaaaatacatgaagaaccggcagccgttctcttgccgaggcatcctgcagttgtataaccttggactcaccctgctgtctctctacatgttctatgagatcatccgcgtcctctggtggtactacttctccaaactcatcgaattcatggacacctttttcttcatccttcgcaagaacaaccaccagatcaccgtgctccatgtctaccaccacgctaccatgctcaacatctggtggtttgtgatgaactgggttccctgcggccattcatattttggtgcgacactcaacagcttcatccatgtcctcatgtactcgtactatggtctgtcctccatcccgtccatgcgtccctacctctggtggaaaaagtacatcactcaagggcagctggtccagtttgtgctgacaatcatccagacgacctgcggggtcttctggccatgctccttccctctcgggtggctgttcttccagattggatacatgatttccctgattgctctcttcacaaacttctacattcagacttacaacaagaaaggggcctctcggaggaaagaacacctgaagggccaccagaacgggtctgtggccgccgtcaacggacacaccaacagcttcccttccctggaaaacagcgtgaagcccaggaagcagcgaaaggattgacaagccgagccgaagcctccagaccgcggcgtgtgattgtaagcacagcgtgacttgtgccctgacgctcatagcagctgctgtcactagtctggccctactatctgcagtgtgactcatgtaggaccttcttcatcagttcaaaacccctagaatatgtatacagattatacaaagtaggcatacgattttctcacatttctgggctctcatcgacccccgcgctagactgtggaaagggaatgttcttgtagtatacaacactgctgttgccttattagttgtaacacgataggtgctgaattgtggttcacaatttaaaacactgtaatccaaactttttttttttaactgtagaccatgcatgtgattgtaaatttgtacaatgttgttaacagtagaaaaacacacatgccttaagacttaaaaaagcagggcccagagcttgttagtttaattagggtatgtttcaactttgtattattcatttgtaatagctctgtttagaaaaatcaaatgtatgatttatgaaacaagtgtgtgatgtgtaacttcaagtgacttggagatgcgaaatctgatggcacccttggttttataacgatggctttaaataagcaggctcaagtctagtggaacagtcagtttaactttttaacagatcttatttttttattttgagtgccactattaatgtgtttaaagaggtggggaaagggtccaaagcgtctggagacacttacgtacctgtccctggtcccccagaggctagggtgactataagagtaggtcacttttcacttctgaagtgcttagtgtttttatacaggagataaaaaggccattcgacttcccaccacttggagagagagaactacctttcaggaaaggtgacgagacatttattatctgacagacacacacacacacacacacagtgataagggactggttacctgggtccacatttttttttattcttttctgtagtgctactttgacatacacttccttttaaaatgtgcctaatttaccaagagaccaggaagcaccataagcattttgaggtaaaatttaagagctggagcgcgcaggaactgggtgtttgggagcaaccgcttttttcagtgtgaatcatggtggcatctgtaatttttttctgattagcacctaaagatcggtttaaagtgcttggactgcttatcctaaaatcgtgtctagtgcgctcgaggcatcggtcatacaaatggggactcttttcatgtgtgtcatttttaaagtgttgaaagcttagcctttgaataccttctgcattggtaaaaaatccatggaaccactcatggcacatcttaggagatgattgacaatgtataaactaattgtgggtttgatatttatgtaaataccagtttaccatgctttaattttgcacattcatattacaaggagccagttggtcctaattagccttgtgggttttctgtttggaaggagttgcggcatctgtttacatttcccttgtcagatctagaatgtgtgtatgtgtgtgtcttctccctaggtacccgtctgcaggtgtctttacatatctcaatacaaaaattataacatttgatagtgtgctgtcaaagtgtgcttagctcatctggatatacccacactgttaaataatgtctaaacattaatcattaaaacctttttgattacccg

SEQ ID NO: 1130 - protein, 281 aa, Mus musculus
PLRQRGFKMEHFDASLSTYFKAFLGPRDTRVKGWFLLDNYIPTFVCSVIYLLIVWLGPKYMKNRQPFSCRGILQLYNLGLTLLSLYMFYEIIRVLWWYYFSKLIEFMDTFFFILRKNNHQITVLHVYHHATMLNIWWFVMNWVPCGHSYFGATLNSFIHVLMYSYYGLSSIPSMRPYLWWKKYITQGQLVQFVLTIIQTTCGVFWPCSFPLGWLFFQIGYMISLIALFTNFYIQTYNKKGASRRKEHLKGHQNGSVAAVNGHTNSFPSLENSVKPRKQRKD

SEQ ID NO: 1131 - DNA, 101672 bp, Homo sapiens
ccggtgacaaagggcgtccccgcctctctggatccctcccgggttctcggagcgcgatgtgccaagaaggcccggctcctttgattggaattcatgtctggacacccagtttttttctgtccctacaccaatacccctttttgactccatattttagattcagtcactcaggccaggtggctcacacccctgattccagcgctttgggaggccaaggaggagaatcgcttgagcccaggacttcgaggctgcagtgagcggcgatcgcgccactgcgctccagcctgggcgacagagcgagaccctatctcgaaaaacaggaagaaaaaaaagtgtgcgcacactttatgcccggcacaccccagtaacaaggtagacttgtttctgccatcctgaagtgtaatagggaaggtaggaggtaaaaatgagtaaacagaacaactacagattgtgctaagtgctgtggacaaagtaaagtagtggctgaggaagaggaagtagaggagaaactgattttagccaggtatgggaaagacctgtcgttttaaaacgatgacttctcaattgagacctgggaagaggagaggtgagcagttttaagaagagggtatacagcctttgcaaaggccctactgctacaatgccctttcctcatcctctttgacatgtggattcccacagcactttttttgcacttcctaaggcacatcgctttttgccatatattggtaaaaagttttatcaccccaattcctagcacataccaagttcccaaagaatagtcagtaaatatgtactcagcatccactgacttctagatttcttgctatgtgcggaggataatttaacaagtgaattcattcatgaatgaatgttttctgaaaagtaattctgtctttttatgcctgttctatgcatccactgtgccccccctttatccctactccgtgtgaatttttcttaaccacaacacaattttctgggctttcagactttcacagtctagtttctccttgcttggctgatctaataaactaattgggtctactcattagtgaacgaaagttcaatgcgttatcctccccatataatgtctgtgttttggtttgtgttatagtaagctgcaataccttaattcaaaataataaatgaagtgagaaattgaggcacttgactacccccgagttgagaaaatgtttactgatatctgggggacgtgggttgaggaatgagggttccttaccagtaagttccctaatcagtgaagcagcagcttaatttgttttcaaagtcgcttgccttgacctcttctttttgaaattgggcaacctatacccatatgtgtatatgtttttcatgatatgagaaaaccattttgggaaaggtaaattcttgtgaccggtatattgacatagttatcaaacactaggcataccttgattgttttgataagcaaagtaaataaactttatttcaattagtctgtgtctgattctgttgtaaaaagtattaactatccctacattacagattattccaaaatctagtggtttggaacaacattttttgcctcaaagtttctgcagatgaggaattggggcattgtttgccttagcagggttctctacctcaggatttctcacagaccgcagtcaaggtatccactgggcctggagtaatcgcaagacttttctggggaaggatccacttccaagttcactcatgtggtgattggcaggattagttcctcaagggctgttagattcagaacctcagttcccagctccctgtggacaggagaccaaccttagttccttgacatgtagacagttccatagcaccttccttcatcaaagtacacaaagccaagaagttacagagggagtgccaataagatagaggtcacaccttcttttctaacaatctaggaggcgacattccatcatttttgccatgttctgttatgaacaagttactaggtccaacccaccagcatgaatatcaggcggcaaagattattggagccacgtcagaatctgcctatcttgtcattaaagtacaataaactgtgatatgaattgggggctccaacatttttttcttgcacatcctgaaacagcctgtgtcttatttgctatctttatcataaggaaagtaaatggttttctgggagtctagctcaataaacatttattgaatgcctactatgtacctgtcacagcatgcttgaggtgcaaagatgaatgacacatattcttcacttgacttggggaggagaggcaataagcaaacaattacaatattaatattataaatgataaaaagcctgcacagaatgctttggtcatggggaaagaaggaaggaacatattgttctaagtcacattcaaggaagtaaaagaggtcagggtaggtgaagagaaaaataaaaagatcatgtttagattaagactcagtaaaggccaggtatggtggcttatgtctgtaatcccagcacttttggaggccgaggtgggcagattacctgaggtcaggagttcaagaccagcctggccaacgtggtgaaaccccatctctaccagaaatacaaaaattagccaggcgtggtagctcacacctgtagtcccagctactcgggaggctgaggcacaagaaccacttgaacccggcaggtgtgggttgcagtgagctgagatcacaccattgcactccagcctgggcaacagagtgagactcggtctccaaacaaacaaacaaacaacagcaacaacaaaattcagtagaagttggccaggcgtcatagctaggcctgtaattccagcactttgggaggataaggcaggtggatcccttgacctcaggagtttgagaccagccttgccaacgttttctactaaaaatacaaaaaaaaaaaaaaagttgggcacagtggaatacacctgtggtgccagctctacaagaggctgaggtgggagaatcacttgagcctggagggtggaggctatagtgagccaaaatggtgccactgcaccacagcctggatgatagaatgacaacctgtctcagaaaaaaaaaaaaaaaaaggtagttaatcttatgcatcaataagatgcaaaagtattaacatattgtattctgtattttctagactttaaaccatctaaaattgtcccaattttatgctcatagggtatttgaaaacttttacattttataccctaattcattctattgaaatacatcttatagagaagactgtaacagtcaaagcatgtcatttaaccattcagattagaaggcaacactgcaatgctatttaactcaaaagagaattgactgagtgaacttgacacaaaggggtatatgaatttgggaagaaaaaagtgctttacaatcaaaggccaagaaatagttttcaaaaataattaaattgcaacacaaacttgtagaatttcatttgagtcttaacatcccacattcactcttggcaaaaagtgaatttgagactgtgaaaataaattatactaccagtttttgacatgcaaaatcatgtctaatattgcaggtggacaaaagcatggccttttatgacacattatactgagaactaaaacatcacacaacttggaatgactaattcacttatggctaagttttaaaaaacttttgttttacaaaagatagaattagcacaaagcatattccgtactgtatcacctgctccaaaaaatctcatagagcactttcagaacatactacttaacaagaacatactccttaacaatagaaaccacatcgctgttcttggtcagttgttcacaggtagttttttggctaaaagtttatttatcttatgcttttgttcacatcctggaaatctttagctatttaatatgttacagaataaaataaatcaattatgaaatgtatcttttaataaccagcaaagtaaagacacattgaccatctatcttagattaaaatcttatcttcagcatatcttagcatatgaagaagttgagaaccgagacttttttttttgcagttttatacctttatttgatgtatttgaggatcagcaattagttctcatgcacatggactgtctgcacatttttgaaagtgctaacaggtacataggtaaccaaagtatagcgcttatttggtgaatcttcatcctcattacgttttctggacaactgcacacggattcggtacgggacattccttattcctttggcgcagagagctttgttgaacctgctatcaatgcgcacacttagagtttccacctctttgatggcaaatttcggaatctctctgagtgcccgaggggcacgcttcttgaagcgcactccatggatgcgcttgtgaatgttgatggtgtattcttggatcaccacctcattgatggcagaatgaccctttgcttctcgccacccttctttgcaggagccgttctgccgcgtccaagttggaaagggagaactgatacttgaatttaaattctaattctgcactaactggctgtgcagccttggtcatgtcatttaactcttctgtggctcaatttgtttgtctcattataatgttggaagcataagggaaagaattgttacgaacctggattcatcactgaaataaatataacagtttttatgtcaagagaaagtgcttgatattcaagataactgatgcatgcatagaaagggtaagatatcccaaattcatagcaatttcagactaaataatgttttgttttcattaaaagtatagttacagtctttttaatagcactttaaaaatgttaaatattcctttggagcatgttaatttttcacattttaaaatttcagaaaggcaaaaggagaaatttgttgtatctactgtaacagggaacagaaaaattatactcagataatatttttaaaactattgtagttagtgttttctttctctttgacttaatttttagtcaaatgatacctagtaaaaacatatattattgacttgcatttcaattttacattaattcatttgttcctttaccaattcagtaaatatttgttgagctcctaccaagtgccaggtagtgttcgaagtgctggggaaacagtggtgaagagaacaaagtctgtgtcctcaatgagcttatggggctgtggggataatacacaaatattaaaaagtaaatctatactatgccagaatgttaagtgctaaggagaaacataaagtgttccagagtgtgaaaggcagggagggaggtgttgcaaatttaaagggagtgatccaggggaactccctaaggaaatgacagtgatgtagcaaccagcatgaagcaaggatgtaagtcttggagatttctgggttagattattctaggcatgaggtaaagagtaaatgcaaaggccctgacgcagtctagtacttggtgtgctcaagatatttcttggggccattgtgggtggaagacagagtagctgtttaaagtcagagaaatggcaagttgcaaaatcatgaaggatcttataggccattgtaaagattttgacttttactatcagggagatgagaaattgctagatgacattgagcagacatgtgacgtgatttggctttggttttaaaaggatcactctggcacctggtttgggaatagactgtaggcagcaaagacagaagtagaggtctggttagaagaccattacaacattctaggcaatggttgatagtgacttaaaccaggtggtcatgttggagatggtaaaaagcaaacacattctggatatgtttcaaaggtcaagtagtagagtgttgctgatgcactggatgtagtaggtgagaaaaaaagaggagctaaaggtaactccaaggtgtctgatctgagaaacggggtccatagaattgtcatttacaaatctggggactactgtggaagatcaggtttgaaggccagttaagagttcattttttgttatgcttaatttgagatgtcttttggatatctcatttatgaatatatctcatttagagaagtcattaataagtagttaagtacgtaagtctggaaatcagggaaaatgtgtgggctggagaaatacacttggaagtcagccgaccatagatgaaatccaaacacatgaaaggggatgatatcacctgcaaaggaaatgtggatacagaagactgggatgcagatctctttcattgcccagtcacttctggagacagtactaaagagtgtaaaaggaagtggagaagaaaatctagagaatccagaaattgtacaaattgttcattcattaatcgaatatttatgaacatttgtgatttgccagaaattctgctagtcattaagaaaacaatatagcagaccaggcatgggcagtgtcttcaagtagttcatgttcatcaagatgaacactcaaggacaaggacagagataaactgcaggacatattgttgaacagcaatgaagaaaaggaatagcaaagtaacaattgaagtatggaactgactccaaggtctgaggaggacaagaaactgcctttaatctacctctgcctccgacaaagacaagccaggtggcctgtgggaattctgggcagcaagataatagaaaacacaaattagaacagaagaaaaaaggattgtggggggaggcggagaacgtaggaaccaacagagactgcagtgtcatctttagcataaaatagctgctacttgacctatattttagtcaactttgatatgtccagaggcaaacattggcttatatcttttctggaaggatgtgtttcattatgtcatgcaaatacgtcctaatgaaacaagtttcactaatcagaattgtattctaatgaaagttccaattgtattttttaattcaactgcagctgctataacaataaaacaaattgcctaggatgttaagtactttccttttcaaaagcaatactgaagcaaccttctaatacacttagaagtgtgtggtttgaggagatttgagctcaatgatgaaaactaagagcaaaaggaaaaatattaccagaatttaaaaacaaatagaaggccaggcacagtggctcacgcctgtaatcccagcactttagggggccgaggtgggtggatcacctgaggtcgggagttcaagaccagcctggccaacatggcgaaactccatctctactaaaaatacaaaaaaattagccaggtgtggtggcgggcgctcccagctacttgggaggctgaggcaggagaattgcttgaacctgggaggtggaggttgcaatgagccaagatcgtgccattgcaccccagcctgagcaacaagagcgaaactccatctcaaaaataaataaataaataaataaataaataaatacatgaaggagaaagaagaaaatattaatagttagctattgaatgaagataattcaacaatcatttcttgggggactaccatgtggatgctatgaacaaacaggtaatagttacaaggttttgttaactgtaccttatatgggctcacattgttggataggtgggttagaagggcaaggatggcttcagcacagtttccagaacccagctggccaggaatctgattctgatgctacctaaaacaggttccttgagccctgttatttagtaagcctggcattggatcctaggtattcttttgatttatttggaaaaaatcccacagttaagttggggagtcgtttcggctccactgtttttcttacagctttactcatgagtgcaatgatgcagaaatacgaagtaattgttagggtgggaggaagtttcccccagagatatatgacacatgataaacattacattgtaatatgtaaaataatacatttgcatatatatatatgttctgagaactctaagtctctggctggagaactaatgagaacatgaccgtaccaacatgtttgagaggagttaataatctaataatcctgggatgtgactatctgacagaggattggaactctggagctgaaaagtgatggtgatggtgagggggagtaacggttcacagattcactcatctaacacgtatttattgagcccttatatgccagggattgtactaagatctacagatcaataaggagcaaaattcaacatgttttccccttcaacggagtttactacctaaagcggtggtctttaaagtggggtacatataccccaaggattgagtgagatgatgccatcagaaagcaactacaatacagggtggtgatgctataatggaaaccaagatacacacatcaacaaagaactgtgtaaaaacgcagcctttgggggatgggaaaaaacagcaaaacgtcatacttaatcatacaataagaaaaatcacttgatatttaatgcatagcttgacagttatataagcctgaacttaaagatattttggtcaaatgggcttaaaacattttattgataggtaagcacaattcaaacaagtgcggcgtaaaacttaagatttttggaatctcaagttaaattagaaacttttaaaacctggaaaggcaaaacttagatgggatgacagagatgaaccctggccttggactactggcagaagcgtgaagaatgaaggagatatctcaaaaaaatagtctatgccaccagcatatgcttttctcatgtcccttgatgtccatagcagcatttaccactctgcattgtagttgcttcctgactgtatcattttccaggcccaagaagtccttgaaggtttcaaattttgaatacctaacatagtatctagcaaattgaagtcattcagtgtttgtggagctcaatggcaactgacaatctcgattctttgtatatgtttaatttacttaatttgtacatggtttgtatacttgcattcctattgcaatggcccactgcctggaacacagctggcacgtgataagcattacattgtaaatatgtaaaagaataaatttgccggccaggctcggtgactcacgtctgtaatcccagcactttggcaagctgaggcgagcggattacctgaggtcaggagttcgagaccagcctggccaacatggcgaaacctcatctctactaaaaatacaaaaattagtcgggtgtggtggcgcgtgcctgtaattccagctacttgggaggctgaggcaggagaatcgcttgaacccggaaggtggaggttgcagtgagctgagatcgcgccactgcactccagcctgggcaacagagcgagactctgtctcaaaaaagaaaaaaaaagaaaaaaaagaataaatttgcctacattaaatagccgactgttaggtggatgcacatagaggagtaagaatacagcaagaggggcacacgaagaaaggctaaatctctggggtttgaatggggaaacagtaggatacaaagctaatgaaggtctttaattatccaaatatcagtgaaaaacagcaaggatcttccgtttatgccctgaaccccctttgtcttaagtgcttaaatatgcttagctgaaaagacactgattccatctttcctcatttaacaatcctttagaataatttctagagtagaaatggagttgatagtggcttccaaagaaaaatcagaatccctaagaaaaatacacggtaaatcctttgcaagggagttatggttacaacagttttgagtcgttttgttcttgttcctttatcttgttcaactgcagaccttcactccggcggtctccgtgggcatttaaccctttcagctttaacgatgaagtggatccccttcagcatgacataactcatagaggagaccgtaacgagggtgggcttctgccacccaaatgcggccacagactcctgccacgcctggcagtaaaaaaaccagagttcagggcatcgacaacttcaccggggctattgcgcaggctctgcgttccacgcaggcttattaggaagaaaggggaaaaaaatttcccagagacacgtggaaccgaggggccaaccccggcctaggctctccaccgcatcggattctggaatttacgatcacgaaagttctattgtcccgcgattggctcccgggccgcatgacatcatagcgcttgattcatccttcgggtcccgattggctggccgcgccattgtgacgtcacggtcagcccacgttctgattgtagatagccggcgccttcctcttcccatcgcgcgggtcctagccaccggtgtctccttctacatccgcctctgcgccggctgccacccgcgctccctccgccgccgccgccttgctgctgctcaaagctgctgccgccccttgggctaaaaggtaaagccgtcagctccgggaaacttcgtcgggggccgccgctcggccatgacacccgcgcgagcgcgcggccgggaagcggtcagagagaactgccgttaggtctcggacctggtgccgagaaagagctgccggggcaacccgcgctccgcccgcggcctccagctccgccggctccggggtacagcccggctcctcgggcgcggggaaaggggtgcgggtgcgggcgcgggcggctcgccccacgccgaggctgaggcagggcgctcgggagcgttctctgtgctgcggtcccacctgtgcgcgctgacaggcgccgcggggcacgacaccgtgcccacaccagacgcggagggatggatctgtccgcctgggtcctcccgccctgggggccggagcgcgcggcgggagagccgggggagcgctctcggagggagcgcgctttctttggagtcggcgaaacccgggtgagttcgaagagcctgtgcgagggtctgcgggcaccgggcgccgctggggggactctccggcctttcctttttgtcctgttctctccgcttccgttaaccctgcggaccttccgtccgcccctcggagggaagcctgctagctcgggaccgcttcagtttttattgaaaccagacaacggcagcccttggtactcagggagggatgaggctggtgggaaagcgagagggcggggactcgggggcgaccggggcggccctttctgggagcctgatccctggagaggcgggagcggttggctgcgagggaggcgcgcggcggggggggcggttgtgctctgcgccgggggagctagagtgtgtgttgtcttgcgagttgtaaggaaaagtgcctttttactgtttccacgccggtaagactctcccaccccaccacctcgggtcgacggagcaatgcctagagcaagagttgttcttgctgaactgcgtcttgcaaccgttccgtgttcttgcacttggcggttccccccgccccatccacaattgtgaattaagctccttgattgcaaatttggagaatgcatttggccagttatgcaaagtggcggaggtggcggggtcgggggcggggggtctctttcggaagaatccagtgcatggtttattagctagactgaggaaccgagaggtgctagatgggatttgtggggagcgagcagcctaatttgttttaaatagcgggacccgtggcaggaagtgcttcatagaattgtacggaagagctgatgttgcttgtcaggttttgtaactcattctcctaaccgcttggcagataacctgttggtctgcacttgttttgcttgcacgtctcagccaaaagcatttcgtgcagaatctacagatagaaacaggcggttttgcattagatggccgtggacaaacattttagccttccatctgtgattggggacaagtgggttacttttctggtagctcagacactgcctgggattctccaggaaagctctgcacttgaaagggaaatgttactcattttccttttagatttttaccctagattctaacttcttattgccaggaactttttctgtactgtttctctttttgcattttcgtttctatttctaattgaagacaaaggggaaatttttattgatagttacagataggtaatgttacagaatgtagtacagaactttgctgaaaagcgacagtagaaggcttactaaaatttgatgtttttcaagaaaaatatcttgtaacttcagatattgacctcacctccttgactcaatttccttgtctatacatggggattttatgtggcaggatcattgtggatttcaagagataatgcaaatgagagcccagcattgagtctgccaaatggtggtttgaaaatgtttccttcccattccctgaaatcaacagcttcttcttggttacagaccttaatttttggatgttctgtttgcaagaatctttttttccactacctcttcttttgctccctgcataatggttgcttgtcttcctgcttctagaggtgagcatccatccttgggtgtcttatttccagcttgaattacacaaatcaaagcaaaactgtttacttttcttgagggtaactttggtgcctaggtgggtagttagtgtgaagagagagttttacctcttgctttcctggctacattcttctctcctaaaagattttgtaatttttttttttaattcctcctctttgcctaccagctcttctgttatcaaaaggctaatcctctcattagttacctgtaaataagtctttccttgaatgctttctgtgtcaggtacttattaatacgcacatgtacataaacggttgctttccacacgtaattcttataacacctctgtgaggttttatcccccagttgttttttaagaattgaggagcactatgaagacacatgcacacgtatgtttattgcagcaccatttacaatagcaaagacttggaaccaactcaaatgcccatcaatgatagactggataaagaaaatgtggcacatatacaccatggaatactatgcagccataaaaaagatgagttcgtgtcttttgcagggacatggatgaagctggaaaccatcatcctcagcagactaacacaggaacagaaaaccaaacactgcatgttctcactcataagtgggagtcgaacagtgagaacacatggacacagggagggaaacatcacacacccgggcctatcgggtggtggggggcaaggggagggagagcattaggacaaattcctaatgcacgcagggcttaaaacctagatgatgggttgataggtgcaggaaaccagcatggcacatgtatacctatgtaacaaacatgcacgttcagcacatgtatcgcataacttaaagtggaagaaaaataaaaaagaatctctaggattaaggcctagagatgacaagtgacttgtccaaattcctatagctctgtctcctgcaacatctctgctccttcatatatccctgtgctgccaggattatttgcccagtgggctctgtgccattatgtaacactgttactccacaacttaaaaatctaaccttgtgtttaaaggttcttgttaatccatccaagactaacaatttattgtctcttaaatctgtctaaaatctgttcccttccttgtagcccacacttgattcattttttaaattaattcattgacttctcagttactgattttgggtgtgaggggctggatacaaagatgaattacaacagttcctgattccagagggtttcctgatttagtatatactttaagcctgtatacacatacttaatctacaccttggaccaaaagagagtcagaagcagatttctgggacacttatatctttatatctgagaaagctttatggcagagctatccatgttaagggcctagcattcctgaattggtcaggatgcttttggtgcaagaaacagaaaacccaactgagacctacctgtgcatctgacctgaaaagtcctgagggcaggacttttgctccatttctctgaagtcccctcagatgtctgttatgtcctagactgattttccaagatgactgacagcagctgccaccataatctcacatggggattccctgacttcctgccaccctccaaagagtcctttaccttaaggtgattgacttaggccttggttacttgaagcaataactggaacagtggacatttgataagctgggggcccatcccagaaccagggaagtggagttaaatctcctcagctagctgcttcacctttaagaagggcctgcagaacacaggaagtcagctacagcgtctgttttaaggaccgaatggatgattggattaaactaaattgacttgaattaaaattagaatttagccttacattttgtaaaggactcttagttgataggcaggaataggaggacatgcgttctaggcaagagggagtttggagagtaagcgagtgtggaatcattgggcaaaaagcaaatagcacaattggcagaagctggtttagaaggcaggagtggaagaaaaggtgagaaaggcaagttattgatgtaataataatggctaactcttactgagctattgtatgtcagaccttgcactgagcccctcacaaggacttatttctattattaatggatgctacagcattcccattttacaggtggaaaaaggcccagagtttagacacttgatttggggtcacaaagcattccagctcagatcaccttgacaccctggcctgctccgtctcctaaggtgtttggtagaataccaccaataagcttttgaataagaatgaggacattatgagtgctgtgctccagaaagacagtcttgttagagtgtagggtggattgttgtgggtttgttagagatggccagggcagtgaaaaggcctgacctgaagccacagccatgagcacagacttgagagaggtaattgtgagagactgtgtccaggataagacttgaagaccagttggatttgagggccagcaagaggagggatactcttccaaagagaagagggagctttgtgatcagatggaaatagccccacagcctagatagatatccagactagctgtttcttccaattcctcctcttcacggccaacctttgtcttagctatttttttggttgcctttctgcaagaacatgtttctaccacatttcatctattgtcagcttttcacatttcacatctgggtagagatggagcttataatcagtggcatcttaaaatcactgcaggtaactttccacattttaatattacagaattgggatgcctcctacacttttccctggtgagaaaaggaaagccccaatgttaccaaaggtggtgcagccagatgctggcagagccaggcttctgggcttctttcaccagctgggttacctctgctcccatgatagttattaaaacacatgtagcttcacgttacaggtttatagtaaagtacatacatgtttgtgtgtttattaaaactgaagtaatttgagaagattggaaggcatgattgtttaagtagggtgcctcattcttgtatagaatctggctgccttggtttcttgtcctaacttgaagaaaatcaactctgagcattggtctcttttcctttaaaatgaaagattaaattttattttcatttttgcctagagcaaattttattttttatttttgttttgtttctgtttggccagggatagagaatgaaagtgagatcatttagatcttagaaaggtagatgttggctgggcacggtggctcacacctgtaatcccagcactttgggaagccatggtgggcagatcatttgagctcaggagtttgcaaccagcctgggcaatatggcaagaccccatctgtacaaaaaatacaaaaattagctggatgtggtggtacatgcctgtagtcccagctccttgggaggctgaggtgggaggatgacttcagtccaggaggcggaggttacagtgagccgtgattacaccactgcactccggcctgggtgacagagccagactctgtcccaaaataaataaataaagaaggaaaggagggagggagggagggaaaatgtcagaacagttgatggagattgcagcagcagcagcaagctgctggttttctctttatgagattaaaacatcactgctggagatgttctggcctatcctgacctgattttcagtttctgcaataggaaccctcaccaccaaccccagtttcaacccgtaaatgttattaccagcctttttggttcccactggcgtgtttgctccatggtaacatttttagtggacttgtaggcattcacttttagaattgtgtagtctctggatttaaaatattcatacttggtgaccttttagaaagactaaattcccactcttgctcctccatcctcttctgccagttctgtgtgaagtacagttgtaattgcattcaggcatgagtatgtcttagtattccttattattagattggacttttttaccttttatttgatgtctgctggctgactgggatttagggaaaaatttctgatttattttaagatttttagtgctgatactggcatgctttctctaattgggagaataacaattttattgaaatatacctgtgattttaaactgtaatctttatggttatattaggtaggcaccctcttgcgagcacaggttccatctctgttaagttccacatttaccccatccttttcctcatgtcaacaatttcatcctgtcagaattaatctcttataagcccatgctgaacagacctaattgaagccatgctggcgaattggccactcaggtctgtgttttatgagtttctgaaccccagagtagtacttgttcctctttggtcttggcacagcaaatgctacaacaaagtgagtgttatgaatttctccttccctgaagaatagttctcatgataccaaattcagtaattattcatttgcttccaggggagtttgaaatgtgatgtatctccctaggggtagtattcagggtacttctgcttcagtctttggcagaagaaataatacttcaatatttacagaagtcgttgacgcctccatcagctgtatttgttagaagcatctgtgtgaaaatttgagtttgcttctgtccgaacttctgcatattaatctctgtgatggatctgaggtgcatttaaaagaatacctcctgtacttcttttaagtaaggacagctgtgggaagcagattgggttggcagcctgcacctatgcggggttccacctctgccacttaacagctgcgtgggcttcagcaggtaagtcactctacctccttgagaccctagaatctatgtagaacttggaaggtgataatcctgtgcctactttggagggtattaaaactatcagtattgtacatgaaagttaggtggggcactgacttaatttaattagcatagtaaaaacatctctctgttatataggatgtttattgaagcattgtttctaatagcaaaagattggaagagttagtagactaaatgtccttgaaaagaataaatcatgctacagctgggcaacggaatattctgcaaattttaaagagaacaaagctgttctatgggtactgaatatagctgcttggtaccacataataggcacttttctgaagtgttcaacatgtattaattcattgtggcttcacaaaagcccacgaggtagggaccccaattttacagatgaggaaactaagataaaggttaagtcacttgtccaaatatccacagctagtaggtggcagaggcaggattcaaacccaggcagattggcttaaagactctaatcttggccaccctgctatgctgtacacctgtcagacctaagtagtgatctttgtatttgcagctttagatacacgagaggaaacaaggttgagtttcttattcatcgttacattctgggaggctgacggtataatcaacatatagcttctgttgacagtaactaaataaaggtttagataaagaaagctaatagggaataacatttatgatcaatacttgaaagggtgaccgtttgtttcttccattactccttattttagatattttgaacttaaacctcttttttggggaaaatcagaagcgtacacactgaatagcttacaattgttagtgtaagaaatcagtgttcaaaagcccagttgagtcagtgttcactagcctgactggtctagtgtggctggattagtatgactggtcaagggcatccagcattggtttccttacccggtcctagccccatctggtttgatttacaaggtatatacgctcagagaaatgcagacgggagggaaagacactcacattctttagggagcctctatctccagattgcctgatctcccttgggtgaaaatgtaagtcaggtgtacaagtcgtacaagtcatgtatagcttgacaatgggaatactttttgagaaatgtactcttaggcaattttgttgttgtgtgttcatcatagagtgtacttagacaaacctagatggttaccacatacatagggcatatgatataccacattgctcctaggctacaaacctgtacagcaagttactgtactgaatactgtagctagctgtaacacagtggcaagtatctgtatatctaaatgaagaaaagatatagtaaaaatataaaagataaaaaatgatacaactatgtagggcacttgccatgaatggagcttgcaggactggaagttgctctgggtaagtcagtgagtggggagtgaatgtgaaggcctaggactttactgtacactctagactttataaacactgtatacttaggctacattaggtttataaaaaatattttttgattaggtgtggtggctcatgtctgtaatctcagcactttgtgaggttgaggtgggaccaggcatttaagaccagcctgggcaatatcacaagactccatctctacttatttataataaaagtttttttaaaaatatgtattattttaatatatatttttcttccttaatacataaactgtagcttattgtaacatttctattttataaattttttaaacttttttactcttttgtaataatacttagcttaaaacacaggctgtatggctgcaaaaaaaatattttatttcttcgtatccttattcttcaagctttttttctccttttaaagttttttaaacttttttgttaaaaactaaaacaaacatacacattagcctaggtctgtacaggggcaggatcatcaatgtcaccgtcttccatctccacatcttgtcccactgaaaggtctgtaggggcagtaacacacatgagctgtcatttcctatgacaacaatgccttcttctggaatacctcctgaaggacctatctgaagctgtttcatagttaactttttaaaatatgtaattagaaggtgtacactcaattaatgataaaaaagtatagtataccaaatacataaaccaatgacatagttgtttatcatcagcatcaagcattatgtactgtccataattttatgtgtgatactgttacaggtctagctatgcagtaggtttatttacaccaacatcaccacaaatgttttattgtgctatgatgtcactaggcaataggagtttttcagctccattataatgttacaggagtatcattgtatatgtggtccattgttgatttaaaggtcattatgcgatgcgtgactatattttgaaaacattctgatagagaatgacattaagtcattttgatacaaggccccattaagggccactgtgctgggccatggtgttcaggctatagacaagtctgccaccaccttcagttctcttaggatccttagactctttcagaactgagttttctttctgggtgtgggacactaggtttggcaacattgtaatggctataagtatcagcattcctaaaataagagaatcacaaaattcatggggtggcttatatattcacatggaatctgaacaggtgataaaacaactgttggtttcagagacatgctatagaggagatgaatacacaattgctagactgtgtgtccctttgaaaaatgctgtattgtagcaggattttcccccattttttacacatttaactttgcttctccctctcctcactcaccctcacacccaaacaacagttataaaatgtgggcgtgtagattgagttttaaaaaagaaatgtgtttttgtgttatatgccttatttatgttacacaggcttgaattaaaatcttttaagacattttcgtttggggggttgcataactaatctttattatgtttctccaccgtcttttaatttcagcttaaggtatcactgcctttgtatactttgcacaaattaggttggagaactcaattgataatttcctcaaatgataatttattttgaatattcaagtaatcacatcagttaagagactgcactcagataagaaccatcagcagttgcctgtagcagaaaatgttgcttaaaagccttttgaatatttgtctccctgttatttgcaattgcagtcttttggtttagatgtttagaatatgattgaagtagagcccagactgcttaagctcaggctttaagggaaccattagaggcgtgtgtagtatcttggtgtctgttacctaccttggccattgattgtcttctctacaagatgcttcatccaagaaggaagttgccctttgaaacaggtgccctttgagcttctccagagagacccataaagacattatcccaggacctcatgtttctaggagaatgtgataaatattgtgatggtttcattttcagagcagctgccttttcttccttttgcaaggagtaggaacaaaagcagcttctttttgtttcctttgcaagggcttagaataggctcagtgtgacccaagggaagttggatgtgacaagtgacagtaaggtaagtacttttcattgaccccctggtacagagttcaggcttgaacttaccatctttttaagaaatgggactggtgtattaaatttaaaatgtaggcaaacagttgcaaagtactgtcagaagaccaaatctcattgcatgatctacttgccccatggattcaaatatccatccacccacccaccatccacccttagatatttatttctagcccatctatttcttttgagctccagactcataacttttcatcgttgggtgccccacatacctcccctgttggccaacgtagtcaggagcaccatcctccgccagtttgcccaagccattaagctggaagcaatgcttgtgttctcctctctcatcaaccatgcttttaccaaactttgctcaactgtcagtcaccaagtattactcattcatactctctgtccttctaagcttattccccttccccacattgccccagccttccgtagcatgtcagatccttcctggacaactacaatttctccttggctccttgcctctgttttcttgattcctaaaaattagatgaggttgtacctgtatagtgctttgcatagtgtctgccatgtttatctggcacatagtgtaggtatctagcaattacgtgcctgaatgtttctctaaatacatatgtacctttcaaatataaccagtcctataatatgtgctaatggctgtgtgaagctgagtatgccttgatagcctgagaatacataatgtttcacaaatgaagagcttacctgggcaggagactttagaaggccagttgccttgcttccagctgaaggagtagaacaccagcagctctcagaccatacaaattgctagacaccttttcctgttgtggcatggtgcaatgaggagctcttacctatgcctggagacatgccatctaaggactcgttggctgcagtctgtgcagatcttcacatacaaggagatggccatagctgtggtgctctgcagatgtggcagtggcttcatcaggatgaacgaggggcccctggagatgatcaagctgctcacactgcaatacaagctactggaattaggtctgcttctggacaaggaacagcttgctggaatggacatccatgttcgtgtgaagggtagtggtcatgtggttcagatttatgctgtccttcagtacatctccaaagccctggtaccctgttacccaaaatatgtagatgaggcttccgaggagatcaaagacaccctcaccagaccttgctggtggttcacccctgttgctatgaatccaagaaatttgcaggccctggtgcctgtgctcactaccagaaatcatagcagtaagcccatcaaaaagatcaaggtttacctttatagtaaacaatggttgaaggtctttaaggttaaaaaaaattgctagacatcccagctgccctagaagcagagatgacatgtgctgttattttaaagggccttgcttacctgcatattacctgttagggctttcaggtagaatataccaatgatagaccagtctggtggcactgttcccaaggacggaatagggtgaactttgatgtctaggcactcaaatactccataataaaatgatcatggaaactggcagtcttactccaattgcccaggatggagtgcagtggcaccatctcagctcattgcagcctcaaatttcccaggcccaggtgtccctcctacttcagcctcctgcatagctgggactacaggcaagcaccaccatgcccagctaattttttatatttttggtagagacaaggtttcaccgtgttgcccaggctggtcttgaattcctaggctcaagcagtctgcctgcttcagcctcccaaaatcctgagattacaggtgtgagccattgtgcctggcctggccctcttatttaaccttgttttggttggcagcaacattgagcccaggctaaagtacaccatacatgtcggacagagcttatctgcctcagtagccacttggtcagtatttgttgatcacttaaacccactcagtgttggtcatttgtctgtgttagcctctgctaaggaatgtggaccctacacgtgacaatacagttaccagtaaaaagactcagtaggaattatgaggtatatactcgaatcaacaggtagtttattattatactacgggtatggctgtgtatgttgcagttaggttcagctgcagcgatggacatgccaaaataatagtggtttgaataatggtatcccaaaacaaagtagaagtgtgtatctcttatgaaaggcagggtggatggttcagggctagtatgaccctgcgtaaattccttgctcatcatacgtctgtcaggcttagtgtggcctcagtcttccgagcagcaggatgtaagaagaaacagaaagtagaagcgcggatggtgctttcttttatgggaagttcccagaaacagcctccagataactttgcttacatctcattggctagaacatcaccccgtggctgcaggtggctggaaaatctcatctttattctgggtggccatgtgcagctaaaagtactgctactgtttatagagtttgggcaagaaccggctgtctgtgccatgggtggtagacgagaccagcagtccccactcacttggaactgagagtctgggggaaggatagtgacaaaataaacagatacttacagtgacaaggcctctgagaggtctgcaaaggtgtgccctgcgagtaaacaggaaggacacctaaatcagactggtggggtgggggaggggatgaggaaacgttgcctagagactaagcaagaatctctctggactgaggaaatgggcagggtattgaagcaaaggctcggaggcaaagggggcaggtagttgggtgatggaggagcatatgaggaacagaaagtagaccagggaagccagagggagacagggttctgatcacatgggccctggggccacagggacaggtttggtcattttccccggagcctttgactggtttctggaggtgagtaacctagacaggtgctttcagggggtgaggagcagcacaagactagaggcaggaaatatccactgggagagagtgtactaatctggttgggaaatgatggtggcttcagctacatagtggctttggggatcaagagaagtggatgcaaatcctgtaaatcccatagagcttggaatttagaaataatttggccttttcacgtaataggtgatgaaaccaagaatgagaatttaaatggcttgcccagaatcacacagctagctgtggagcagcaccagatatcatttctctatctaactctttcctttatgtcactgttgaatgtgctgatttgggagaacagggcattgtgggcattttggagccagcaacaggacctgaatcctggtgtccattgcagagggaggagtccaccctgctttgggggctggattcctggtaaggttatggggcaggtcacagaaatgagggagttggaaggaaaaaccaggtgtgagaagatgatggattcagtttttggtttgttgatttggagattcaggaccaccatctgtaggtggagagagatcagatggaaactggtccttgagattggaattggggatgcaggattgggtggaattggtcaaaacttttctataccctttctttaaatttctccagtgaaagggactcagcaactgtttttgagtccattgtgtcatgtaccttagaattaagagatttttccagtgtttagccctgaatgatttttgctgcaatttgaattctgtgcaaccacagagatttaataaaaataaaataggttaatacttaaaaattagtaaattaaaataaattaagtaaagataaaagttatatggccctcccttgcatattttaccctgtgctgcaggtcttctcaggagcctctctggctctggttggtctcttggtccaggctgtggcctctgtctcttgggttttcatactgtaagatttctccaactgagtttgggaggctgaagccccaaacagaacttgatggcttgtgctggaaaaggggaaatgggttctgcttgctacaacgtgttaaattctgtttttaaaatgtcagtttggcatcaaacacttttttagacatgtttacatcctaaaagtttttggtttcagaagttttttgtccttcacaattaacttggttgcagtgattaaagtatagcctatttcctgggaaataggagacaatttcagagccactatagaccatattgacattagagattgtaggataccatagacagggaggtcaatagacaggcaacgtggtatcatagttgttttatctctccctggtcactgtccttctacctaatgttgtttcaccgtggaatttgagcttacaggtgaaaaagactttcagtgaatactgcaccaagtataatttaaaaattttaaatcctatatagatatggggcatgactaatagagtaatgacttccataaaccacacatgaaaactgctttaattataattatcattacttttattctccagaaagggaaataaggttaaaacaagagagcccattcattctaagttgaccagttaaatttcttgttctcccttccctttgtcctttgatttgataaaaataagatttttgtgtgctaaattgtgagtattcatttacattaatcagtatccctataagacaaagcccctgaaaacataaactgagtgcagcacgatttaaaacagagagggaggagacagtcttggtcctgttcttggtgccctgctcattactaacgtctcagttgtactgtccactataaacagtcatgattttttcccccattcttcagatcaagtcagtttcctctaatgagacagtctacctggttttataggcatttctctgtaatgttttccaaacgaagaaagcaaacagcaagcattttgttgggagaaatctgcaagtgtctgttctgtggctgtgaactaatgatctttcagaggtctagtttaaaagcactgagtttcttcatgacccatgaggatatgtaatccacctttatagcaggtaagtgttgaggttcacacaggattaacactctctttaacactgttctctacaccgttctcttgcaaagggatactcttcccaaccctgaaaggcatgcttggagaggtggagtgtcactcccagattcttattttagagaagggagtgtcatgtaattttctccctaccttatttattcattctctcccctctcccccttgctgacctgcttttcttccttcagccaggtcttcgctttaaggagtcagctgagcttcagccactgatgctgggggcacatagtggcccaagccaccctgtagctgtacccttttggggagggtggctttcgtgtttttgtaaagtttttgaagaacctcttacatgatacagtttgaactgattagcaaacagagccaaagaaactagtacctgatgaaaactgactgacatggtaggcaaatggaaagtttggtttccaaaaagtgtgtgttgtggcaagttgaagtcagaaaaatgaatttttgactttgattctgagtgatcactcctctacgcactcccctttctctttctctccttgtcctctccatttcactccctctccattctctctccgcctcttttccctcctcctgctccgttctgtgtatatgtttgtatgtataacacttcagcatttatgtagtggttgataattgaatacattctatttgcagtactacctaatgtgatttaaccacaggaaacttgcttctctcattatttatgattttaaattttagtttttggtaattaagtctccatgaggagcgtcctcatttggaaggagagttagcatcatgctgtggctaaagaaactcagtttttatgcctaccaataatgtgaaaatcacctcactcctgtttggctgattgggttgaatttctcttaataccatactgaatgtaacttgacgagttagtagggaactggtaacaacttatttcacagagtatttctagttattgatgtagtttgggtgtttgtcccctccaaatctcatgtgaaaatttcatccccagtgtttgaggtggggcctactcggaggtgtttgggtcatggagacgaatccctcatgagtgacttggtgccatctcatggtaaagagttcaatgtgagatctggttgtgtaaaagagcctggcatctctctcttgctcttctttgtcttgcttcctctctcaccatgtgacactcttggtcccccttcacctttcacagtgagtaaaagcttcctgaggccccaccagaagcagatgctggcactgtgctgcttgtgcagtctgcagaactgtgagctaaaataaacctctttataaattaccctgtctcagatattcctttatagcaacaccaaacggactaatacagttacaatatatttagtgtaagatttattcattataattagcttatttccaaaatgaccattttaacaaacttcaaatattttgagtgttagatttttaaactcggtgtactccaagtttcatttaactgctaaaggacaagtttagtcatacactgcataaccatattttggtcagtgatgaactgcctatataatggtggtcccataagattataatggaactgaaaaattcctcttgcctggtgaagtaggggtcatcttaatgtcctagggcagtgtattacttatgtgtttgtggagatgttggtgtaaacctactgcactgctaattctataaaagtatcacacatacaattacgtaccatatacagtgcttgatagggataataaacaactatgttactggtttttgtatttactgtactttttatcatttaaaaaatttttatttatttattttggaaatggggtctcgctctgtcattcatgctggagtgcagtggtgtaatcacagctcactgcaggcttgatttcctgggctcatgcagtcctcccacctcagcttccaagtagctgggaccacaggtatgtaccaccatgcctggctttttaaattttttgttgagatggggtcccactgtgttgcccaggcagatcttcaactcctgggctccagcagtccttccacctcggtctcccaaaatgttggtattacaggcatgagccactgcctgtcattattttaaagagtactcctacttaaccaaaaaataaagttaattgtgaaacagcttccggcaggtctttcaggaggtattcctgaagaaaacattgttatcacatgttattgcccctgaaggccttccagtgggacaagatgtagaagggaagacagtgatattgaagatcctgagtaggcctaggctaatgtgtgtgtttctgtcttagtgtttaagggaaaaaaaagttttaaaagaaaaattaatagaaaaaagcttacagaatgagtataaagaaaataatttttatgcagctgtacaatgtatttgtgttgtgttaattacaaaagagtcaaaagttaaaatgtaaaagtctgtaaaactcatgaacagtggcatgcacctgtagtcccagctactcgggaggctgaagaggcaggatcacttgaggtcaggagttcgaggctgcagtgagctatgattacacctgtggatagccccactgggcaacatagactctgtccctaaaaaaaaaaaaaaaaaaaaaaaagtttataaagaaaaaaatgttaccataaactaaggttaatttattattgaggaagaaaaaattttaaaataaatttagtgtagcctcagcatagtgtttagcctcaatgtagtatttataatgtctacagtgtgcagtaatgtcctaggccttcatagtcattcaccactcattgactcatccagagcaacgtctattcatggtaagtgccctgtacaggtgtattggtttttattttttatattctatttttattataccttttctttgttgagctataaatacttgccactgtgttatggttacctacagtattcagtatagtaacatgccaaacaggttaattgtagcctaggagcaataggttgtaccatatagcctgcatgtgtagtaggccatacatctaggtttgtgtaaatacactctatgatgttctcatgatgaaatcgcccagtgacatatttctaagaatgtattgccattgttaagtgacgcgtctgtagaagttctttatttttaaagtgtatttgggttatttgccattatgataagaagctaaatatataatgtctttttagaaataaaatcgtacagaagaggaaaattctacgtgcagtttttaatacaacagctctcaaactttttggtctgaagacacactattctctcttttttatttcttatttttttctgagacgaagtcttgctcttgtcccccaggctgagtgcgatggcatgattttgactcactgcaacctctgccttctgggttccagcaattctcctgcctcagcctcccaagtagctgggattacaggtgcctactaccatgcccggctaatttttctatttttagtagagacggggtttcaccgtgttggccaggctggtctcgaactcctgacctcaggtgatccacccgcctcagccttccaaagtcttgggattacaggcatgaaccactgcacctgaccgacatagtattcttagacaaagtggcttgagagaaaaacatttaaaaaagcaaaaggaaaaaaagataagatttgcgctattaaatgttactgagaaactcaaagagcttttgtttatgtggattatatctattagtatttaccttattagaaaccaattttaaattgttttaaaatataggtttaaaacaattatgaaaacatttaaaaataactaacctactgtatgataataaagtatatatttttcaaaatatatttcaaaatataaaaacgtatttttcaaaacttttggtgacagtgaaaaagtaatctcgtagtagcagtagcagtagcagtagcagtagtagtagtagtagttagttatactttatatatatagtactaaaagtactttatatactacttagttataaaaacatttttccttcttgcttcagcagccattgcctcctgtttccttctgcctaaataaattctgtgttttatgccacaggctctatgtgtgtcaccttcacatgtgaacttcaccaggtgggctggttttggtctttttatcaaatgaacatatctgtaaggtactttttgtagacaggacagtatttaaaagcaagcttatgtccacttaacaacactggttgcttgctttagtgctctgtggtaaggctgtagtggtcagtttttaaagtaaaaacccaaaacaacaaggagtaaacgaagagattaaggtctcagtgtagcattaatagctttttagatgttcattttatttttttaattcatccctttctctttgctatctatacattacagtatttaggcttccagactagcaaccttttggaatagttttaaaatagctgatttcttttttgttcctgtctcttggatagatactgcttgacctttttttaactgttgattttggataatgcctttgttttaataaaaaattgctgcatcatgtcccacatctccatcttgttttatgtaaccatttaacctttaattctatgtgttacaaaaagatttcctctggccttttgtgtataatgtcagatcaactagagctctactttggggactgtaaatagagcattagcctcctcttgattttactctaaggaattcttttaagatttttataacctcagattctttgatacctgaatcaggtaccagtacagttgagctactgtatttccagatgctcagattttttttaatgggatatattttgcactatctaatatagtagtcactaactactactagtttttgagcatttgaaatgtggttaatacaactaagaaacagaatttttagtttttcgtttcagtttacttaaatagctatttgtgcccttgtctgtctcattgggcagtgcaatgccaaaggtatctggcagtttctttttaaatttgtaggttcattcattcattttaacaagagtgtttttttatatgtgtggtagccggtaggttttttactatctgtggttgtcttattgctggaaacggaactagagggatacaggaggtggaaaagtggaggctattgataattggctgacttttatggggtcttgggatcattgtagatgagatttgaggggaaaataaagttcagggaaggacttttaggttgaacactggagctgatttgtcagcagaaaaaaagcatccagtcgagagaggaaatggaaggtaaaaggcagatgggagatgaataaattcttgaaagaaacgggaaaagatccagagtataagcagaacgatggaaagatactgtatgaattggaagggtgaagagggacttttaaaaaaagttatttgaaatttttcaattgaagtgtaatttacattatataagccatttttaaatgttcaactcagtggcatttagtacatccacagtgttgtttgccacagtcacctctaattccaaaacattttcacatccccaaaggagaccactgccagttagcagccacttgccattctcccctctcctgagcccctgacaaccacccatctcatctgctttctgtctctgtagatttgcctattctgaatatttcctataaatggaatcatacaatatgtgacctcttgtatctggcttctctcacttagcataatgttttcaagtttcatccacccctgctgtagcatgtgaagagtgaccattgaaggaggaggacttttaagggattcatagggactgtccagatctcagcaaaaccatcaattctgcttgttggatttacctagcagtgaggcaccacaggggtaggttgggcatcaggagtatttgtgactgtagcttccagcctgagtaaggagggtggggacaaagatctgctttggtgatggcagattgcctactagggaaggcagacaggaggagtgagtggatagaaacttgtcagaagagggagcagaatatcctgtttcaaaggatttgggtccatttggggtcctaagttagagaatgcatgtggaaacatgagctcatctaaagtagggtcatctcatctgtttgtaggtcagcgtcacccataactgtctgctgcactagtggtggacacacagtttctaaagttgcaagcaaggtgaaaagttctgtaatcttgccctgctgggtaatggtgccaagcgcctgttgtgagtgcctcctcctctgctggaagcatggtgagggaaagcagaccttgggtttttttctgctttctcgtgaaggccggtatggctgagtcaccgtacttgctggtgcctagggcaaaactgctttccaggctgctttccagcctcacagtcatcccacagatacataacgcctcaaggacttagatgttaaccacaggttaaataatttgtatttggagtatgattagaatgtacagagagggacctaacctagtctggggctctgcgggaggaatcagggaagatttctctggtgtgcacagatagaggggaagtgggacaggcgggtaagggagctttccctgcttgggagctgccggagtcaaggacacactgcagaatgtgaaaaggaaacgggtggggttgggggcagtgagcaagaggggacggcagaagttgggctagggaaagcaggtatgggcctgggtgtgaaagggcctctaagccaagtgagggattgtaggctgtatccagagagcaaggtgacaaaaagcttcaggcaagagtggccccactgattttggtggttaaaaagaactcaggtgcaatgtggaggtggatagaaggaggcaagaatgagtgcctgaaagccagctgggagtccacaggaaagaaaatgggccttggtggtgcagctaggaagaggtggatatttataagatgctcaagacgatggcttcaacaggctaagagatgactgagttattctgataccctaccctttctgtctactgtgtcctttcacacctctatatctcttcatgctgtgccttcgcttgaattatccaccaaccattgtgcctcctaggccttccaccctgcaaagtccttaataacctggccaaatgccacttgcatgaagtcttccctgatgctctgtccagagttagttcatttaacaaatatttatggagcattcacgttttaatgtgccttaaatcattgctgacttggttttctggtcgagtggaatgtttaacacatgccagccaattaacatggctgcttaataaagtcgaggtaaaatttgagacacttttccggcctaccaagtgtcacaattcttcccagattgtggcagcccactcctgcctccacttcttgagtagcaatttccttatttctttcccctgctccttggcctgcccaaacctaccagtcttttaagtgacagtggaagtccccctcctctggtgaagcctctccctttgtcccaagcctggatcttcctcctgagcaaagccctcagccctgtgactctctgtctctgactgggtgctagtgggaaatcaacttttcatgtgagtctagttgcttcggtcattcagaaactctctcaggctcactgcatccagaagagtgcttatgaatacttgacaggcataaatatctacagggtgcggtatcacatcaccttcatggtgttccataaatgataggtaagatacgggcacttttttaaaaaacgacatttggacataagtatcagatatttggcttacgacacagtaatgggtatcttaagcctagaagttgtgttttagattgaagaatcatacatgattctctttggctgtatttatccataaattgtcctgtccttggataggacatctagacacttgtgaagtggtcattagtaaattgagtgtgaaacatggcattttggagaataaattgtgaagcaacctccctgaaaacttattagtaggataggacattcatgttagcgagtggacctagggtgttgggcagagtcagggagaccaggtgacttttagcacagtgcttttctaccttgtttcggtctagatggaacagggttatcagtgtccagaaaaaaagtctttggcttccggttaatctgtccgccccagccattgaagagagtggggtacttatttatgcaatatcaccctaggccttttctagtgtttgtatatcatctctctgcaagtttcttctgtcaaacctcaagctaattcttttcctttttgatacactttggagatgaagaaattctgatttttttttggtatgatagcccattcctctgctttctctccaaactaagactaagtagttatcccagagtcgttgctatagaccagtattctgccctccttcctgattctatttcttttcctttttttttttttttgacaggatctcactcttgtcaccaggctggaatgcagtggtgccatcttggctcactgcaacctcacctcatgggttcaagccatcctcctgcctcagcctccagagtagctgggaccacaggcacacaccaccacacccagctaattttcctattttttgtagaggtggggtttctccatgttgcccaggctggtctcaaactcctgggctcaaacgatctgcctgtcttggcctcccaaagtgttgggattacagctgtgagccactgtgcctggtccccaattcttttaactctacttaatccatgtttttaaatgttacttttagttatataaacttatgtaatcaatatccatagatagagatctgtaactgtttttcttttcttttttttctttttcttttttttttttttttgaggtagagtctcgttctgtctcccaggctggagtgcagtagcacaatctcagctcactgcaacctccgccttccaagttaaagcacttctcctgcttcagcctcctgagtagctgggattacaagcgtgtgccaccatgccgggctagtttttgtatttttaatagagacatggtttcactatgttgaccaggctggtcttgaactcctgacctcaattgatcagcctgcctcagtctcccaaagtgctaggattaacaggcatgagccactgcacccgacccataactgattttcttaaattctgcatatccatattttaaaagggatatgggaaaagcttgttacttatcctggctttagaaactgactaatattgggccgggtgcggtggcccatgcccgtaatggtcgggcatggcccgatggtcggtcagatggtcgggagttcgagaccagcctgaccaacatggagaaaccctgtctctactaaaaatacaaaaattaaccaggtgtggtgatgggcacctgtaatcccagctactcgggaggctgaggcaggagaatcgcttgaactcgggaggcggaggttgcggtgagccaagatcacgccactgcatttcagcctgggcaacaagagcaaaactccgtctcaaaaaaaaaaaaaaaaaaaaaaaaagctggctagtattggacgtggtagagccatttctcattccatgaagtttctatttgagacttttttagtcatagcttcactgagatcatgttatcactgtatttgcttttatgtcatgtctaggcaggcctccttacctgagaattaatatgaccacgtttatcctgttcctaggatgccaaaatctgatgattcatttgaatggggaagaaaaaccaaattaagtgtcacataaacgttgtaattaatgtaaccattgactcactgacattctatattttacaccattgtcttggtgttagattgtcttggacataaactgttcctcacctaaatcttagactactacttgggacccagtagtgtgttacaggtatctgtaggttgctagtttgatgcatttttctattttcctgacagttaaatttaatcttaatatgattgacagttaaaagtgcaggttgtggagccaacattcagggtttgaatcccattttccaacaagtgcaggctcggtaactgaacttactgagaagattaaattaaatagtgcatgtgaagtgcgtggtacgatgcttagcacacattaagtgttcaatgttagctactatgattattatccttggtgtgttttctgtttttaatggtgttatgatcctgaagcaagggactcaataaaggaagaatattatggtttcataatgaaatcctcttaactcattagtgaagcattgcaatctgtaatgatgcaagctttgtttgatgctgtaacaaattaggccagagttaatgccatttcctgttaaaccttggatagcttatcttagtacttgaccaatgttttgctggtggagtcttctttttcagtgtgacataattcccagatagtgggctggttgtcctcgtgaggattttaatgcccaggtaggagttggttgattctaaatggaagctgttgtgttttatgctgtttgtttattctaggtgtggtgattgagccgaaaagtgcaggcaagaggagtctttggggtttctcatttgtgtcctgtgacatgagtatgaaatctctctgtgagcaagtaaaaatatttttccaactgctcacttagtgcctccgcatgggattggaaaagtcaagctgttttatactgctttattgacagtaatactaataacataaaccaaatttggctgactcagctactgattagcaaaaatagcctgtcttctgcgaaacgttgtatatataattaaaaaaacaactggaagagtcttcttacttcaagttcttaaatactttaaaaatttggcttttttaaaggtagttttgtgcctctctcaccagaagtgaattttcccttgtttacggggttcctgtaaagctgtggatgggtttgtagattcagttttttaaatgacagtccatgtccccagacagaatagatatttaacaaatgcttgaactgtgctttttaaaatccatacttgttctcaaggattgctgttgtttatgtgaagcataatacttcttagaggttttaaaaattggtaactagacttagctccttggtttgagggggagtttttgtggaatgcagacagttctatttactgtgtactaataacctgagagaaagaaaggctcctaacatgggtgacctgttaacaaataccagcttatgttcacaaattaatccttaggcaagcagagcacacacagcatttgccatttcacttttctcttaccagtgttagccgaaatggctctttacacaaattttcagtgtatatatttagtgtttatttattcagctgttggaatttcggtatgatttatatttctgacatactagtatagtgttttacattagactaaattaatgaagaatttttttcttcatgagattgtccagttatggcaatggttgcagttataaaggctgtttacatagaccttgcaagtgggaacattaatacataaaaatgttttgaaaaggaatttttcaatgcattctaagactcttcgacctaattggccaatttctgggagtctcacccatggaaatactttaatatacagctaaagttttatgtgtaaagatgtttattgcaatattatttgaaaatagtgaaaacttggaaacattaaatgtctaatattagaggaatacataaaagtgtttatataaatgttgcttcagaagtcaaattaggttcatgaaaatgattgctggcagccttcatgcaggtaaatgatccaaatgcagaaccgtggatggtgatgcgcatgatgtctgcaggactgaccctgcttgtgggatttaacccttttgtcacaggtaacgttatttggaaatgtctctgcagtacacatactctttggtatggcatgggctgtcaattgcgagtatgacctcttgcttcatacccaacagaacatcttacgtaaggaagaaggcagggatctcttgtctggtgattatcacaagcatggatgagcttctgcagcagttcatcaaagaatccagtgggtggaaggattcagttggctgttgccattgtaattgctctttccctatttttctcatgggtctccatatacataaataaggagaggtgatccttctggccaccttactgcaagacagtagtttaaatgaattcaagaatcctgtttttaaagtgcatattttcagtcatttaaaaaaaataaacattgggataataagccggtttctaaggagttaatttctggtaattacagcgaatactagagatggtttgttttttcagtcctaagaactttttaaggctgcctgcaattcaatatatgattgggtgggactagtaagaggtggggcctgatattctgtggaaggaagccttttctactatgctatgtcctagcatagtagaaaagacactagaacaaaagttaagaaatgtggggttttggccgggtgtggtggctcacgcctgtaatcccagcactttgggaggccgaggtgggtggatcacgaggtcaggagatcgagaccatggtgaaaccccatttctactaaaaatacaaaaaattagccaggcgcggtggtgggcgcttgtagtcccagctactcggaggctgaggcaggagaatggcatgaacccagggggaggagcttgcagtgagccgagatcgcgccactgcactccagcctgggcgacagagcgcaactatgtctcaaaaaaagaaaaaaaagaaatgtggggttgttttgtttttgagacagactcattctgtcacccaggctggagtgcagtggtgcagtcttggctcactgcaacctctgcctcctgggttcaggtgattcttgtgcctcaggctcccgagtagcaggaattacaggtgtgcaccaccacacccagctaatttttttttatttttagtagagacagggttttgccacgttggccaggctggtctcaaacttctgggctcaagggattcagactgcctcagcctcccaaagtggtgggattacaggcatgagccactgcacctggccagaaatatgagttataatcaatctagcttcatctctatgtgacttgggcaaatatataaacctggtagatacataggattaaaaccaaaccttcgtcttacttacacatttccaaggatcaaaccagataatatgagagtactctgaaaatataaagtgtttacaaagatgacaaagggctgcacacaattaaaatagaggagagcagggtttgagtaatatattgaaatataagttcaagagagggccctagccctgaactgatctcattataccgaaccagcacagtgcagtgaactaaatgagaactccagatgaaccaaatgaacaggcatgttgtggaaagaaaaggaagttggatggaagaaaggaatttgggaccaatcaagaaggaaatagggaatattaattatattctaaatgagaaataaagccaacatccatatacattttttaaaactgaatgtctaaagtaaccctagggaggagagcattttagagctgcactctcagttatggtacctagtagccacatgttgctcctgagcacttgaaatgtggctggaatgactgagagtttctaattttttattgattttcaactattagaaaacttttaagtgtttgaaacaacttgagtatgtgaatccactttcacagttgcaaatcttatgagctctaaatgcagatcggatatttcctttttctttctttctttttttttttttttttttttttttttgagatggagtctcgctctgtcgcccaggctggagtgcagtggcgggatctcagctcactgcaagctccgcctaccgggttcacgccattctcctgcctcagcctcccgagtagctgggactacaggcgcccgctactgcgcccagctaattttttgtatttttagtagagacggggtttcaccatggtctcgatctcctgaccttgtgatctgcccgcctctgcctcccaaagtgctgggattacaggcatgagccactgcacccggcctgcagatcagatatttccaatgaaaattgagtgtccacatgagtggactataaatgtaaaatattagattttaaagacatagtacaaaaggaatataaagttatttttatgttgcctacatgttgaaatgataatattttagatatattgggttaaatcaaatatactattaaagttgaaaaaaaggaaaatgactgctttagtgttgaaatttaagcttacgagtatgtgcttttttgttttattttatttttatctttttgagacagggtctcaattttttgcccaggctggagtgcagtagcgcagtcacagctcactgcagccagcaccgcctgggctcaagccatcctctcacctcagccttctgagtagctgcagccacaggtgtgcaccaccactcccagctaattttttgtagtttttgtagagatggggcggggtctcaccgttttgcccaggctggaagtatgtgcttttttaaagcatagaaaaaggtagaagaaataaaattatgtttacttatgtaaatatatttatgtaaatttatatatgctaatagcaaagctccatgctaaatgctgtacatgaaccatctcatctgattaggtattcatgttattcccatttgaagagaatattccaggtgaggagattgaggttttcagacatgtactcgcccaggatcactccacttaatcatagatggtagaagggttaacgtggattcagctatactcttggtagctttttgtttttacttcaaaatgagacagatattttttctctactttccatattttctataggaaacatcattttactatagaaaaaaatttattgtaacgtggggaggcagtagaatgtagtggttcaaagagtaggctctggagtcagttggcctcctctcagtgtaaccttggacaagtgacagtggctgtctgcctgggtggactcatctgtgagagggctggcatgaggactgagattatccttgtaaatatacagcagaaagactggcacatagtaaggatggagtgagtattagttgctattatcattattatgttctgcaaagaaaaggacttgaaaataagggggaaaaatccatcatttgaaatagtgggcgggattaggtttttattttattttatttttttttttttaatttttttttgttctcatctttttttaaaattttattattattatactttaagttttagggtacatgtgcacaatgtgcaggcttgttacatatgtatacacgtgccatgctggtatgctgcacccattaacccatcatctagcatcaggcatatctcctaatgctatccctccctcctcccccgaccccacaacagtccccgtggtgtgacgctccccttcctatgtccatgtgttctcattgttcagttcccacccatgagtgagaacatgcagtgtttggtttttttgtccttgcgatagtttgctgagaatgatggtttccagtttcatctatgtccctacaaaggacatggactcatcatttttatggccgcatagtattccatggtgtatatgtgccacattttcttaatccagtctatcgttgttggacatttgggttggttccaggtctttgctatcgtgaatagtgccacaataaacatacgtgtgcatgtgtctttacagcagcatgatttataactggattaggtttttaaatggttatctggttctcttggagagacgttaatgggatgagagaaatcactttggaaagcttccttataagcattcagtcattagcagaccatttagtgaaggaaatagcaatttgctaaataattcaacctcctgaagtgtgtaattcatgtttgagcatagctggcttaatgttttcttaggacagcaggaatacatgagtccctaaacaaatgtgtgggttaggtcctagcttaaggatgaacttcttacatttaatactatgaacttaatgtacaatttatctttcttatttttccctgtaagagaacatgtcagtacagtgaatttccactaacttgcactccactaattcaaactatatgacatgcctcctaatcgaacaggttatgaaacatacacgagactataatcaatttattaataaaattagtaaagtgaaggtctaggtgaacagaactttccatattctcttcttgcagtctgcttgccacccctcacacacccgcagcccccatgcttcctcactcactacatggcacccccctccagtgtgagaagccaagagcttggactcccccctctccctcaccttgcccaccctggacatctctcccatgtgacccctgcattccctctcctgctgtgcctttggagggcccccatctctcatctggactcttgcagtcgtttttttaaccaacctgatgctgatctcaccctcttttcagcctctcgccccaactgtcaccccttctttaccaaccccccagtttaaaaacaaactctggagctcttacctccttctccaacattgtttttcactttttcatctctgccttctgtctgatccccactagcaagccttaaatattactctctttgcagagcttcacctgacccactggtccccatacagaattgactgctctgtattaatccccccacccctacccatccttttctcctgtacataccttgtcatggcacatagatcactttattacagttatttactgtttctccttcccttgctagagacttttgacctttctgaaggcagatttgtggtcttgtggatttctgtgtctccagtgcctgtgacagtgtgttaaatgtatgtttgatgaatgtgtgcttctgatgatgataaaaatagctgccacgaattgaggtgtttgtgcattatgccaagcacttcatacaattttattatctcatttaatcctcacagcaactccatgaggtataagcattattgtccccatgtttatgagttgggaaactgaggtctatatagttttagcagcttgcccaaggtaatattacagtgtatgctattacagtatagtttcagagcctagagaactctaactgaaattatgcatattacagattacatctttctcatagaaatggtgagaatctagtcctattgctgccacttcattatgagttaagtaaagtattttagggctggtctggagatctgtcctccactgacagctagggtttttaacttggggactactgggatttgggcgaccctgtaaatgtcagtcagtttaatccaaactctctgtcattttgagatggagagaatttcccttttgctttaatcagattttcacaattgatatggaacccccggaaatttaagaacaactaatataacatttctccaaaaaattattttccaaaggccagatgactaatttacaatagtacaaccctttcataaagtggagattatgtgttttgataacttgactatatgaatgaaaatgattcatcttagatactaggttttttaaaagtgtcaattttctttagactctgtaaacagtcattcgtttatctcttaaatggaaaactgcttctctgttatggaccgaaggtttgtgtccccccactctcaattcatattttgaaaccctaacccccaaagtgatgctattagaagggtggggcctttgggaggtaattaagtttagatgaggtcatgagggtggagtccctatgatgggatcagtatttttataggaggaagagggaccagtactctctctacccatccccatgtccccaagtccccaggaggatacagccatctgaagccaggaagaggacccttaccaggagcctaatttgctggcaccttgatcatggacttcctagcctccagaaccctgagaagtaaatgttgtttaatctagcagcatgtgctattttctttatagcagcacaagctggccaagaccctctccttttcttctccaacccagttgcaatttattaaattgttcatgtatgtgaaaaaaatcattggagaaaaacataatacattttaaacatgtcactgcttctgtagttacattaattttcttcaaataattgttttcattggattttgcataggaaatatgtgatagcttttccaaatcaaagtaggatattatgtactattttatatccatcccctagctcctgaccagtaaaatgttcttgcctttcaagggtgggtgtgtgttaagctgttgttagtttgtgctgatttttttttctttttaattttatttttttcactcaaattatgacataagacatcaatttctgtgttttgaagtgaactgaaaatatgggtcatgactggaggaatagctagatttctgagctgaagggaaaggaccaggttctctgtccctaccacttgccatagtgccttacacatttggtgctcagtaaaggcatattgttaaacgattatatatgccattttacaatctcagttcttttcctaaaattttcatatgattgacttctccaggaatgcatttctataatttctatacaggaataggtatttgtttctccttcactctgtccttaattttcattttggaacctgttggtgtctctcccttggtgttctggctgtaggtgggcacctaactgacttcatgttaatttgatcactggctttccttcgttttgttacagctaaatggctctatgacagcctagagttgaattttggtacttgcagagaattgaaatgaaggaaaaatcatattagccagtcggaatattcagttacattaacatgacttgctaaaatccttgcagttccactaaaatgtaatcaccttaggacccaattctcaatatttcacctttagtgattatcaaggaggttttaaacacagtggctcatttgttgaatgtagcacttggtgaaaagaagaaaagcattgccaagaagagatctaatcttgctggataatttccaaggagggttacagaagacgtcacctcagccttttctgggaaacatccactgtgctctgaagagctgtgggggttgaacagctctttgctaatggcaggcagcaaaaagcccagagcagagcacaagcgtggtggcatcactcttcagtaagctatagtcacatagtgactgcacattgtaaaagtgctgcttaacccttttttgcttctcagtgcattgataagaaaatgatccaaaagatggaagaaagcacagtttttttgtttttataatatggtaaacttttattatttttcattttcaaaaacatctggaatctgacagtctaaaactaagtttttagccaggcatggtggctcatgcctgtaatcccagcactttgggaggctgaggcgagaggattgcttgagcccaggagttcaagaccagcctgggcaacacagcgagactccttctctacatttttttttttaattagctgggagtggtggcacatgcctgtagtcccaagctactcaggaggctgaggtgggaggattgcaagagcccgggaggttgaggctgcagtgagccatcattgtgccactgcactctagcctgggagacagagtgatgtcatatcttagaaatgaaataaaactaagttttctatgtaccatgtattaaaaggaaaatggcaaggaaactaattgcaggaacttatataaagcagtagagtcataataaatttataaacttttatcccaattatctgtgcctgctcatctacagtattgtaaagtgagatttggcatttataattctgactctgagatacctcaggatcacaaaatgcctctgaatcatcaaagattacattttaatcaggaggattttatttggtatctttcatgattttcttactgtttgacagcgggcctctttgtgagatgtatgattcctcgaagttaattagatcattgggttgatcaaaacagtatccccatcacctgagtagtctgaataagaaaatgtttactgggaagcttcatcagaccactgtgaaaatgagtatttgaaacacctgcatttaggtaaagtcttaaacttttgtgaatggagtcatagttcagactattcctttccaacataaaccttcctttacagttacaggtgccaaaaaagtcaccaccacatgtgattgggttggggaagttgattgaatttttaaaaaatcaaatgctcagcctagtttgtttttctcatggtcgtagatttttttaaaaaattgaactttttgagagaattgtagattcatatgcagttgtaagaaataatacagagatcccaagtactctctaccctgtttcccccagtggtaacattgtacaggactgcagcacaatatcacaaccagcatactgacattagtacggtccagatacacaacattgctatcagcacatgtggccttcataaccacatcctcttccatcctgccttcacaccctttgtaaccccaggcaatttgttaatctcttttctatctttatagttctgtcatttcaaaagtgttttataaatggatggcccttttcacttagcttaattctttagagattcattcaggttgttgaatgtatcaggtttgttctttattgctgagtaacgttccgtggtgtggatataccatggtttgttttaacaattcacctgttggagagtatcttgtttgtttctagtttctagctagaataaagctgctgtgaacattcgtgtacaggtttttatatgaacataaagttttcatttctctaaaataaatgcccaatagcttcatttgaattatggcatgatatttaattatattcctatactataatttctgtagcagaaggttacttctaggttacggaaggtttcatctagaaggttacttctagatggatacttgaaggctaaccacctttcagtttttgttacaaatatcactgatgacaatcataagtcaatcttagtgcacatctgcttgtatttccttagtgtagattgctagcagtaggcttgagtgtataaaatattaaacctttttttaaagtacctctccttttcttaaagttatttttaatttttaagtatatctaattgcagagcattgtcattaccttagaaagaaacatcataaacagtatcggtcacttcccattccttcgtttccccagcccctggcaaccactgatggatctgcctattctggacatttcatatgaattgaatcatctgtggccttttgtgtctggcatcttccactttgcataatgttttccagattcattcatgatatagcaaatgtcagtactgtcttccttttaatggccaaataacattccattgtatgaatgtacaacattttgtttattaattaatcagttgatcgacttttgggttgtttttactttttgactgttataaataatgttactatgaatatttgtgtacaggttttagagtgaatgtgtgttttcatttctttgggtatatacctaggagtggaattgctgggtcatatggtaattctgtgtttcactttttgaagacttgccaaactattttccacagcagatgtaccatttgacagtcccgccaacagcaagcgcctgagtatttcactttctccatctacttggccagtatttgttattttctgtttttatgattatagctaccccagtggttattacatgggtctttttttaaaaagagctgttttggcaacactgccttgcttacctaccaggtaggacagccacaggagcgctgtttatgttgaagtttccagtggtgtcagttggctgtctctaggcttttgtggaagagaaaattgtgtaactgcctacctctcctgccagagcaccagacttgatgtgaagttctgtgaagagcccacccagtcacctgtcagctcatttagccacactggagagtctgttgaggtacagaggggagttaccagtgtcgtttgtggactcagttgctattttggaacagaaatttgcagaatcctttaagctgaaaaatttccatgctagtatgtatcatatgaatagcaattatttaccctttcacagaaaaaaccaacggtcttttctgtgtgtattgtgagataaagtctggaggggtttgtggttttctttttagtaggtaacagttcgaaatttgttgcagatcataagctgccaaataatagctttaagatgtacttttaaaaatcaactgtgtgattggctgggtgcagtggctcactcccgtaatcctagcactttgggaggccaaggcaggcagattgcttgagccctggagttgaaaaccagaccagcctgggaacagagcgagaccctgtctccaaattaacaacatcaacaaaaaaatcaacttgtgataattgtaaagagcacaagttttggaccaactacaaatttaagtaacttaactttgtgagctacttaacagtaagtaatgtgattaagtcttcccagtgtgcccgaaaattttttgattttagcactgaaagccttacatcccgggaaatcccccaagaaaaacagaacagttgcctaccctaagccatataaacctagagttaactacttaagatctctgaactttagtttcctcgtctagaaaatagggatatttccttagtgagtctttgaaaagccagctacgtagtaggctcttagtaaatgttagatcccttgtctcaggctagtaacaaaagtgttgtattgttttcctaaccaaattctatactttagataataagccttttcacttctcttcccagttccagttaaatcgagggggagggtttatattttattaggccgtgcttgtaattggtgccttaattatgtgtggtaaccaaaaggaaggctagcaaggggaagtagagttgtcttgtaagaacctcttcttccagccccactgaccttgttaatttctaaggcttttatctattgttaacaaattacccccaaatttgccaccttaaaatgcagaaacatttactgtcacacacgttttctgagggtcagaagtcccagcaaggcctacctgggtggttttgtctcagggtctttcatgaggctgcattcatctgaagctgagcaggccagaagatctgcttctgagctcattcaggtggctgttggcaggtggcctatttcctgccacattgtcctctccctaggactgtttgcagcatagcagctggcttcccccagagctagtggtcctagaaacacagacagaaacatgccagctgaccaagatagaagccacaacatctgttatcacctaatcccagaagcgacataccatcccttttgctttattctgttggtcacacacacaaccctggttcatcgggaaagggcactacataagggtgtgagtatcaggtgtaccaggatctttgggggcatcttagactctgcctcccatagataccgtatttacttgaagaaagcttgaggtcctgtagtctaggtaatgaaacgaatataataggaagcagctcagtttaggattgatgataatagagccagagcccacgtttctcaaccagtgttcaggttcttcctatcacccatcttgcctccttccaaggaatgtatggaattgtccttggccaaacatttgatttggcagcagcagcagcagcagcctgtcagcagtgttccatactgccccagttcaatatgatgaaacagggagttactaaattcctttctgtgtcccaagaacagctactagggattacaaggagcaagacagatacgttccttgttctcacagagctttatagacttggccactgttgactcctggtagtaatggtgttatggatctcctctactgatagtaatatttctgcaacagcatcccccaaaaaagagcttaccggtaaaaaatccatcaggtgcaggatggattaatgtatgcttgttatgtgtgatgtgtaccatgtcacacagtgtttgaaaaatatgagaactgatctctatcttgatacgaggttttatttcagcttgagagatgtttgaaaaaatatgattacctccccgccccccgccccacctgcgcatcccctccccccagctggtggaattagaggaaacagggaattgctgcagaatttgttggaataaaaaataacttgtccttgagaccatcatcctagtctaggctctgtctctgtaatacagtgtatggataccgtctgggtgataaaaattaaagggtggcaggggattttagtaagagtccaaaacttaattgatatatatagcagtggttcccaaagcaggctgtttcccagaattacctaacgatcttttcaaaaagatatttcctagcatctattgaattagaatttctaggattggatcccaaaaacctgattttaaagctgttaggtgattttaagatgcaaccagatttgagagcccattgatatgaaactctagaaagtcattcattcattgatccactcattattcattcattcactcttagtttcaatgagcaatcaataattggtcaggcacagatccagacactctagcgataaaatgggaacaccagaggttctgccgttgaagagcttagagcctaataggatgtggacagataaacagataattacagtataactgataatcacagcacttaaaaaataagcctgtaattttatcactgattgagatacagtagaagtgatgatgaagagtatgaaaatgaggtcagggaggattgctgcccctttacttcccatctaggtcttaattacagagatcttaaagaactctgttaccaaacatcttcttccaaacaactttttttttttaacttgataatgttattttaaaactacatagttctgtatctttttctcgtaaaactatatgaattcaggcaatactaacacatgtcaccatcttttatgtaaatacatgaagatgtcctcttgagagactgcatggggtattttaagaatgataggcaatagagttggagatgtggttcaaattctggctccacccaacctctgtgactttggcaactcagcccccttttcagttatggtaaatgaataagtttattggccatctatcatatgctagttgccaggagtacaaaaaaaaaggcttatcagatgcagatttatttctgctctgtactaaggttgggatagacactggcctgctcttctactcacagagaagtcagtgaccagcatctccttgacatttcagaggaatttatctagagtcttttataaatccccagattcacaagtatcatttgtgagtccatgccaaatagaaaataacagagctgtgaggtatggatgtgagcatgtttcactgccatggaccttgcagggaactccagtttatgccttagcaaaactcttccataaacattgaatatgaaactgatcattgtcaaaggtctctgtaatgatgataataatagaaacatttttacggtacttgctgtgccacacactattctaagcatttcacatatcttaactcatttaatcacatgaggaagttaatgtaattaccctcattttacagtctaataaactaaggcacagaatgttaagtaacttgcccaaggttacacagctagtaagtggtgaagcagggatttgaacccaggctctctggctccaaagtgtatgttcctaaccactaccacccaaaagtggttgagccacagatgtctttgcacactgcttactaatttgtactgtggcagaggtcatgtctgtctctgtcactttcctgttcctcacaagcaatactgcttgacacaaagtagacactcattaaatagtttttaactcagtgagtcaactgcctttcaaatggctggtagcctgaaaagcagtcattctgagaatcattgaacacacagaaataaaaccagtcaggaggatgactaactcctgcacctgatggatttttttttaccttgcttcactgcagccttgtgggcattaattagttactgtcagcaaagttctatgtgaaagtggagttctaagtccaactgcagcaatctggccttcacccaccagcaaggagcattctgtgtgtgaattatcgttgtctttttccaaataacagtgtgcttcactcaattaaaagttatcaccacttcttcttctagtttcaaaagaaaattaagttggcagctttaagatgataaaactctacaagagtaattttctacagtggtgaacccttttctgaatgctcgtttgttgtgtggattgttgtaaatggtccttgtcttgactctgctgagaactgggggaagaactttgaacttgactgtacatttcttctttagctgtgaataagaattcccctagaataaagttctaaaatcatgttaccctcccgctaccaactgctgaaaaaatgttctatatctgagttttttaagatcaagtgtatttgtgtgttgcctttcaagactagaatacatctttgtctcccagtggggaagaaatttccttgaatgtttaagaggtgtgtgtgtttgcccctctcccctctctctctcccctctccctctcccctctctctctcccctctccctctcccctctcccctctcccctctcccctctccctctcccctctcccctctcccctctcccctctcccctctcccctctcccctttctcctcccctttccacggtctccctctcatgccgagccaaagctggactgtgctgctgccatctcggctcactgcaacctccctgcctgattctcctgcctccgcctgccgagtgcctgcaattgcaggcgcgcgccgccacgcctgactggttttcttatttttttggtggagacggggtttcgctgtgttggccgggctggtctccagctcctaaccgcgagtgatccgccagcctcggcatcccgaggtgccgggattgcagacggagtctcgttaactcagtgctcaatggtgcccaggctggagtgcagtggcgtgatctcggctcgctacaacctccacctcccagccgcctgccttggccccacaaagtgcggagattgcagcctctgcccggccgccaccccgtctgggaagtgaggagcgtctctgcctggccgcccatcatctgggatgtgaggagaccctctgcctggctgcccagtctggaaagtgaggagcgtctctgcccggccgccatcctacctgggaagtgaggagcgcctcttcccggccgccatcccatctaggaagtgaggagcgtctctgcccggccgcccatcgtctgagatgtggggagcgcctcggcccagccgcgaccccgtctgggaggtgaggagcgtctctgcccggccgccccgtctgagaagtgaggagaccctccgcctggcaactgccccgtctgagaagtgaggagcccctccgcccggctgccaccccgtctgggaagtgaggagcgtctccgcccggcagccaccccgcccgggagggaggtgggggggggtcagcccccgccaggccagccgccccgtccgggagggaggtgggggggtcagccccctgcccggccagccgccctgtccgggaggtgaggggcgcctctgcccggccgcccctactgggaagtgaggagcccctctgcccagccagccgccccgtccgggagggaggtggggggtcagccccgcgcccagccagccgccccgtccgggagagaggtggggggtcagccccctgcccgcgagccgccccgtctgggagggaggtgggggggtcagccccctgcccagcgagccgccccgtccgggagggaggtggggggggtcagccccccgcccggccagccgccccgtccgggaggtgaggggcgcctctgcctggccgcccctactgggaagtgaggagcccctctgcccggccaccaccccgtctgggaggtgtacccaacagctcattgagaacgggccatgatgacaatggtggttttgtggaatagaaaagggggaaaggtggggaaaagattgagaaatcggttggttgctgtgctgtgtagaaagaagtagacatgggagatttttcattttgttctgtactaagaaaaattcttctgcgttgggatcctgttgatctgtgaccttacccccaaccctgtgctctctgaaacatgtgctgtgtccactcagggttaaatggattaagggcggtgcaagatgtgctttgttaaacagatgcttgaaggcagcatgctcgttgagagtcatcaccactccccagtctcaagtacccagggacacaaacactctgcctaggaaaaccagagacctttgttcacttgtttgcctgctgaccttccctccgctgttgtcctatgaccctgccaaatccccctctgcgagaaacacccaagaatgatcaataaaataaaataaaataaaataaaataaaagaggtgtgtgtgtttgtgtgtgtacatgcattttttgtttctgtttttgttttttatgggctcacactttacaaagtgtctttactgatcatgtagtagaagagaagagagcacctctgttagagttccagataactagcactgagaaagttttccccgaggaaatgccatctgtaactaggatttagtccgtgttttaggatgctgccattgtggagtcaggtgtgccattttcttttctttttattttgtaataacaggtgtatctcctcatttatagtatcaccaatagataattattatactcataggacagattggagtacttgccgttaaagagtttggactctaaggagttgcagagtttgttcccataatacctgaacacagaagtatctagctcatgtaaaagttgaagttgctgtatactaaatgagttgtctagacagcaacaagaggggcagtggagtggaagtaggctttgtaacacctaatctgggccttggagaaagggttggaaatgaaggcaagaggacagggaggaaggaccacagataacagccactggtgtgactctccacttgttagaaggatgttagaaggtgttagaaggatgtccttctccagcgatggttaaaaagtgctttttaattaactagtagcagccaaggagcaggaagtggaggcttctgtgttgaccctaaacgtatttttgtacaacaatttgattgttgcaacatttaaaaatttcccctccaattatccattataccagaatgaggttgttctgccttcttcagccgtggagctaacctgtggcagtgctttgtagaatctatcagtgccccagttttgcagttactcatctaaaaccccaaatagagctgtgttttttgccttcgtgtatgatatatggcaggaaaaatgactttatcagagaattacaagagtttgttacttccttagaatggaggttagaaagtataggaattctgcagggggaagaaagagaataagcatagattcagagtgttaggatgacagtacacaatcagatgtaccactgttggtgcggtagatatttttgagccaagatttaatccagagttatcatttatttaaatgccaacactttaacatgaattctgtcgtcaagttactttcatttctaaagcttgttagtacttggatcttctttcctttatggtcttcacgacattttgaattttaacattcctcagcaaggtgtggttttatttgggaactgattttcccaacctagaaaaatctttttaaattctagaatcagggttgtgactaccaaattaaagcaccatttaatttttcattctgtgtaactggcagccaacttgaagaatgttcccatgcctgcctaacgttaacgagttgactgataaaagtgatggatgggaatgagagaagagaaaatgcaaggaaatctcagtctgattccttgcagcacatgggtttgtaaactcagctgactcatttttaggtgaacaataaccgttaaaaaaaaagtaaagcaggatatgatgaagttaagctagacaatagctaaacgtttttaaatcaaaaggaatgtgacttgactgataccacaggaaagggagctttcaaagcaagctgactgctgccttagaagccagacaaaccaagacttggccctaaaaatatctttactgttttagagtcagcaaacagcctggttgtgggtttaggaaataaacttttctttaatataattcttataccaactctttactataatgtatatttttaaaaatcttgataccttttaaaacagatttgccttaagatcccagtacttttcctttgctgggcagctttgtcactctctcctaccccaggtagaaatggccaagatgcttaatatttgcactctccttgagacgtacttcatcttgagaattgtgactgtgccttctcctcattaaccccaaccacctccttccgttgttgccacctacccccatcccctcatgttctgttgtccttgggagccaagtggaaaggaggtggagggggactgatttgctgtaaagcttattgtagtgtcttttttcaaacatgcttctagcaactagtttgattattagttcaaagtgagcactgatgttgacttaacctcccacacgtgattcacctgggcatatacttgcccctggagggagttgaacagtggacagatggattttccacatgagcaggactctctttagggctttgggttttgttctttgttctgctcgtgttagtatttccaggtttttgtattccaggctatggtagttccagtctttctctcgaattcaggcccaaggatcctaaaattctacaacacttagtatagtacatggggagggaactagccaggagcgcagaactgatccatggtggtgggggtgagtcagacgaaggtgtgctgaactccctcacactctcttgctcctttcagctgtatctttaaatatagggtagtttataaagagaatggtcagctccagtcagttttttgtagtgagatacttaaaatgagacacaattataatatagttgcatggttaccaaaaacactccagaatcttataatgggaagcggctttttaaattaggagtgtcttttggaaaatgtgcgttaaaaaggaattctttaaaattggttctaatttacctgcccgtaatccatttttactgtcattattttctgtgtgtggctcttgaactagtgaatagctttggaagactgttttcattgggactttttttcactgggccctgttactactccctgttgtaacctgtaattctgggaagccccctaggttgagtgcaggtcagagactcctggttaaagaggatgggaatcgatgctttggcttggtgtcagcgtggtctttttcctgggaagtgctggccactcccagccctgtccattttcctgtcagtgtgtggggaaccagccagatcaaagaatagcttattcttttgctgcatgtaggactaaagctccttttccatggagcctagtgcctgggcttggtccctgctagtacaattgtacagagcagctgtgttcccacttgacccagctcacccaggctgcctgtagtgtgattcgggttattgagaagttatgtcattggcccaccgtagctcagaagataggaaaccgcaccagtgaggccaaccacagacctggcagtgtgattgggcatcttgtgcaaagtaggtcatgccgttcccataaatccagattactaggcaaagtgtcaagacttttgcatagccctgtgcctcccattcctttagtacaaaagagtatagctcagcccacagaccactcagcaagtgcccaatttacttaacagggcaggccagcctagcctggtgatgaagaattcatttgctgagacctttgtactgttcatgtggcatagcagatgaggctcagcaaggaagatgggaatgaaaagggcacgttgctggcaggagggctgcaggaaggagggttaggagatggtagcagtgtgagcagataaggattggcaccctcttctgttcctagcccgttggccacaagctctctgaaaggtctcaagaaagctctcatgactgacctctgtctactgctgagcaaggcctgggcaccagacggagtggaggacagaaggcctcccattgtgctgcccactcctgtcatggcttctggtccttgtgcatgccagcctagccctgaccccagggccattgtgctcatttgtgcctctaaatggaacacccaccctttcccttggtagatgtgtggcttgctgtcaccattcaggctctgctctgttgccaccttctcaggctgccttctctatgttttccaaaataaattcccactccatgattccagcccctttattctgctttatttttttttgctaacagttattttgcatatcgtattgtacgtgtgtttctgtctgtaattaatatatgtttatggtctttctcaccagcctgcaatcccagggccttcaggtctccgtgcctagcatgtggtaggcactcggtgtgtggtatgaatgaaaaatgagtacatggtattgagggacactagttatggggctgccttgacaaacatgaggttgtattgagtaaatgatgaagcttttggtgaaggtgtctcttagtaacctgtgcagaaacaaacagccttgcctgagaagattacagtatatatccaattgtgggtgtggtaggggagagtttgggggaaatactgaacatgccagagtccagcccaaaatcaagcttgggatccacagctcaggactctcctgattagggcctgttgtccagggcctacctctacctgccccttctcccttttcactgtagtcatttcagaaacaataagcaggaacaataatttgaaaattattatcatttccccacatgtatctgttcttttagagaatgttttgttggctctttcaatatattcctaagtttgattgtgaaaagttctgcaaacctaggagaaaaattctcaagccgagaagaaatgcagtctaagaacagatgtaccgtttctgacaaaaatcgtttcttgcgtgtgcttttgtagagaacacatttcattttataaagatgaaagagtgctcctgtgcctgccagcttccacagggcctcttcaagatggtttagactcagattatttgggacagatggcttgtaacaggattcttcaatatctccaaatactaaattccacagtctcttttggtagcctgctgctggttcagtactcttggactgaaattttaccttatgtttaatcaagctgcttttctgttgccgtgatgttagcctagattctcaaattggactatgtcctaggcatttgtccttatagtaataggtcatttatcgcaattactgggcttcatatttttccggggccactactgttaccctctccattcctgccccaccaatctgtattttcactttgaaacatttcttcactcttgtttccagcttctttatttcctcattacatagaaactgaccctgactacagccctctgaaagatctaattaaaaagtgaaatgattgattcccttatttttgttagacatattcctcctgtttgatctcagaatacttttgtttgaattttgttacagcatggttttgaacatatattcagcttatattcatatcatcattctactgtctgctcatttgcaaactggattttgtttttgctttactatatctggatccttttccccattatgaatgtctcattttttctaggtcaccaggtatgctcctttatgtttatccctattttggcaatcctttgtattaatatacagtaggtgctagatatttgtgtatttaattagtacattccttttagttttgtctttcatgtttgggtaatatctgtttctgacaagttcctctcctgatatattatcaactcccccccccccgccttgcccccaccttctcttgctgtctctctaggggtgtgttagggcttacaagtggacattgtgggttgtcagaatgattggagctcactgatggcatttagtggacagggaccaaggacaattaatgatccacaatgcacaggacattgattgtttccactgtaatgccagcagtgcccctgccgagaagcagagacagccgtgggtggttgacagtattcatcatggagccaatcctgtggcagacatacattcagaaacatctattgggggcttcctacatgccagacactgctctaagggccttatttatattaccttatttaatcttcttaaaggcagttactttggtcttttccccgtttttcagaaagattaaataacttgtccaaggtcacattgctaataagtgaaaaaaaatggggggtttcaaaccctagtttcttataatctagcaaaagtccgttcatgcttaatacctgattattgtacatttaatgtgacccataagtaagtaagttaatattacccattaggtaatagaatctaggttttaaaatgccttggaggaaggtgtctgtccccagtgagcagcttgtccatcagttattcaatccattagtcatagcctttatgaccttgttcctccttatttcctttcatttggctgtttgggatgcagcctagtggggagcagggaaccctgtgacctccatatacatggcccaccatacatcatagatgaaattaaattgtgttagtgtgatttcagtgtcacaaaatcatgatggttgtctttcaaaacttggattttctagatgattttcagtagatgttgaaaaaatagacacagccaaattgtcttttagccagtgctcttcctgaacccaccttgggcagaacttttaatagcctttaatagataaaacatttcttatttaactgtgttttaaagaggagttctctttacgaaacataaggctaaacctattctcttcagcaccaggattttctagaatttcttgtctctcctgaagtggttcaatctagggcaggaaagtggcttaggaccaaaatggcctttcttaggaatatagtatattagtaccccctcatcgtcagggagtacattctaaggcccctagaatggaagcctaaatctgcagatagtaccaaacactatattatatatagtggttttttttcctatgcatacatacctataataaagtgtactttataaattaggcaaagtaagattaacaacaataactaataattaaatcgaacaattaagtaaagtaaaagttatctgaacatgagcacttcgatcctgaggcagttgatctgataacccagaaggttacaaagtgactcaagggtgaagaagtgtctacggtgaggatacgctggacaaagagatgattcccatcccaggcaggatggagtgggactgcgggagattttatcatgctactcagaactgtgtgcaatctacaacttatgaattgtttatttctggaatttcccacctcgtattttcagaccgtggttgatttcaggtaattgaaatctcagaaagcaaaactgtggattaagaggggactactgtatgttaaaatcttaattgttggattgcagaagtgaccttgtgctaaggttttgtaactattgaggggcaaaggtggctgacctggttattggcagatgggtatggggagctggtgccttcggggagctggtgccttcagggagctggtgccttcgtttccagccatgaattggtgtcagcagcctccccaatcacccttgggcaggaaagctgtcaggacagaaccctgttaactactttgaaagtgtcattgatggctcctcctatctctacgtcccatctcatctggattgacttaattgtaactactacaaccattagatgatttcgtggataaagtagtttatcttaaaattagccagtgaatacataacgcttcagtgtggcaagccaaggaagagaagtattgctaaatgattaacagcttagttaataaaatcagttctgcctttgcccttggacgttataatattgatgattattcctgtaagaagaatggccaggaaagttggaaaatctagtcagtatgcatatgaaaagttgattagctaccctctaaatgtaaatcttaaattggggaaggtagggagctatagaatcttagaagatggaggtaaatctttaactggtatctcaagatgttttattaagtgaaaataagcaagtaatatatacacacttctatatataatagtgtttttttagttttttttaactgtgatccccacagtaagaatatattttacatcacagctaagtacattatacttataaatatgatataataaaactaaagttttataaaactatattcattctcactgagagcaaagcattctgattctctactatgatcaattattatttttaatgctaagttgacatgatcatctactaatggtagatttcacccacaattgtgaaaacatccatttagcatgacctctttgtgctcaaaagaggagaaatctctggaagtatattgaagaaatgttaccattaggttccttgtgatgcgtggcttggggattgaggttgagggaagtaatgagatttttgccccttttttttaatttttaatacttgaatttttttttactgtagatatgaagtactgtaaaataataattgataaaagtaacaagcggaaaaaactgtcttgtcactgtggcattctgttccctgatatggctcttccttgtcttacctcaagtcctcagttgttgcccagacaggatctcttcctgtctgccacctctcattccagttagttccacttttttccccactgagatttcagcttcacggaaagagtttttatggaactaagaaaagaagttcagaaaactggcacttcatttataaagtgaactcacagaattgtgtctttccttttgatcttcaagttagatctagcacagaagtcacttctgtgaattaaattcttttaacctaaggaactgaacttaaccttgtctgtagcatattctttgaaaagaatttattcttttatgaaaaaatactgtataaaaaacattttgagtagagattaatcagtatctttttttttcttaataggttttcaaatggaacattttgatgcatcacttagtacctatttcaaggcattgctaggccctcgaggtaaggtggtttttggttttgcttaccttctgcagcatcactccctgcctatagtcacttgtaaatattgcatgaggagatagtagaaaatgttagcattttctatgataagtctaaaactttatcctggataacaaggaatttggagaagtctctgacagagacacctgctgtgggtggtcctccgttgactttaactggagtttaaaaatatgctgtaaagcttgtagcctgagaatactatagatttcaccattatcagtggcatttttttctcaattcttggcagtctttaagaaaaactagtttccaaaatgcagtgttgcaataggagtttaaaacctttccccttttacaattttaagggctttttaaggtcttctcattttgtatcatgttaactcactggtaaatatgcacctgaaccttacttgctgtatcttttagaaagtaaatcagcttcatattgccttcttttgatgtcatctgtaaaagtcttttaaagtcttttgtataaagaacttcttaggctcacagaaaaactagaaatggcttttaaacagacaaaaagaatctcagtttctcatgatttttaaaacacaaaagaaataacaaaaggacttagtctattaacatggcagagatgaaataataggtttcatgtcacctatgataatagtgataatagtgaaggcgtggagaaagagtacaacctctctgaaaggctgttttgccttctgttggaattaaaatgcacatgcccttttgcctagccattctactcctaatactttatcctgtggctagccttgattagttatgcaatgatacatatcaggatgctcattacagcattgtttttcaaggaatcatctggatgcctgtcagtaggggagaggttctgtaaattagtgtatggcccattgaaaagaacaaaaaagaataagttagatccatctgtatgtgcttgggttgggatagtgccttactttagctgtaagggacaaaaaatccaactctaaatggctaaaataataataataattattagcttgcattaccaggtggagcaattccgtagttatttcagggactgtatgatgtaaccaaggatccttgttcttgtcattttctactttgccacttccaggtatcagcagctctgtcctcagaatgggtcccccacttcacacagttgtaggatggctacagcagctccaagcagcacattcagaggaagaagaaaaaatgtttcatttgtgtggttttaagcataaagaagttgtttcccagagctctttgccagctgtcatccctcaaaactcactggccacaattgcttcacatgcccctgcctgaaccagccaccagagggggttaggaccaccacagattgactagatcctaaggattctctacctggggctggagttcgggtcaggtgcccgggaagcactgtgcggtgtgggaggatgaatatgtgccaatttggaaagatgagtatttgtgggaaaatgaataaagcaaagtgtaaatcagaggtttaagttaaaatagggagatttgtgtgtatttattgtttgtgatatatatgttcatacaaaataacagtctgatgttagttgctaagtgggaactggttttcttaaaattgacagccaaggcccaaagctgagaacaaaaggtgttaagcatccccttaaagtccctggggccagccatttccctgaatgacttctaagcacaaccagttctgccggactgacagtaacaccctccgtgaccatagcataactagtggggagggtgtggagggcatgtccctctgaagccaaagcaagccagccatgagagaaatgctgggaaagtttagtgtgtacagtgcaagaaaggaagactgactgacagttccccacgtggacatatgctttattgagcctgttcttgttctgtgaaatcaaggtgaaaacgactggagagagtagcaagatggtccagtctgggaggggtcaaagaaagggcagagccgggtgtggtggttcactcctgtaatcccagtactttgggaggccaaggcaggtgggtcccctgaggtcaggagttccagaccagcctgaccaatatggtgaaacctggtctctactaaaattacaaaaattagcggggtgtggtggtgtgtgtctatagtcccagctactctggaggctaaggcaggagaatcgcttggaccctagaggcagaggttgcagtgagccgagatcacgccactgcacttcagcctgggcgacagagtgagactccgtctcagaataaataaataaatgaataataaaaaaattaaagaaatggcaaaggctgtcctcccaactgctgcttctctgaagacgcagtaggtgaatgctgcatgtgcctcatgttctggagttgtgagccttggcgggtagttaagattgaggagccacaggttttcggggaacatcatagcagggttcaaaggggagcatgcttttcagaggtagcttcctggggtcagccagagtatgaagctgaatctttcaggggacacataacacttaggggctctggctgccaaggagtttcccgccatccaagaagaggttgtcagtttgctgctggcggctgacctgtttccctctccctcctccctgcctaagaaaaggaataggggcaggagaggcccttcctataccagtatctcctctggatccgcctaggtcttcgctctcatgctactactcctcagtttgttaaatactgccctttaaataggcatttatctgatcattgctgcttcaccttcatgttttgttttgtttttattttcatttttgagacggagtctcactctgttgcccacgctggggtgcagtggtacgatctcagctcactgcagcctcttcctcccaatttcaagcgattctcccacctcagcctcccaagtagctgggattacaggtgtgcagcaccatgcctggccaatttttatatttttagtagagatagtgttttgccatgttggccaggctggtcttgaactcctgacttcaggtgatccacccgccttggcatcccaaagtgctgggattacaggcatgagccaccacacccagcccttgttttgtttttaaatcattgtcctctctgctgttgaccattacactcatagcaaaggctgcctttctaattagtgccagtttcactaacctggctaagcagcacgttttctgagtctgcatgtgctggccacacttgccgactgacacacagctgagatggaggacttcagagttcaatgactgccatttcttgggttttatcaccctatgtgtaatctggtatacctggttaataaatccaattaatgggaagtgtagccttctccttgttttcttcttaagttctttggaaagaatatttgtattattattttactgagcaaaaatcatgaataatacattgttattcagagcatgtaacaaggagcttcaccttgtttgatatgtattgaaaatccatgcctcctctcctgattgctttattggaattaagaacatgaataccaggtgacttttatatcatcatggttagagaaattttttcaacgtttgaaaagttgtgaatgtttttatatatcattaattttttttaatttttcagatactagagtaaaaggatggtttcttctggacaattatatacccacatttatctgctctgtcatatatttactaattgtatggctgggaccaaaatacatgaggaataaacagccattctcttgccgggggattttagtggtgtataaccttggactcacactgctgtctctgtatatgttctgtgaggtaagtcaaaggttaacacagtcttcctttcacataaatgcactcatattgctgtcctaaattgtattcctaaatgaggaaaggtggccgcttggggtgtagagacaactgggcaagcaagtatcttaatgcgttatgagtgtgttttaaaatcgatttttcaaaatgtcagagttgtttgtacaagtatgccttctagaatatctaaaatagaagcctttgttattgattcttctattatgtttcgtatgatattcaaaattaaagtattttcagaaatactctcatgcaagcaaaatacagagtggaaaatgaacaaaatgtgaaaaacacatgtgaaagcattttattattaagcatctaataagtgcctgcttcttgtttgaaggtaggggaggaaggaagtgggtggcacttgtgtttggtatgttttgtggcacatcaccctctctgattggataacttgtcaaatctcagttgttttttaaaagctaagaggagtgtgactggtgagatctgcatttaggttttgaattgtctgtctgagttcaggcccagttattttatatcactgcaatgttgaaaatcacatttgatgatctcaaaggcaaatgttatagcttaaaaatgaaagaaaaatcagaatcaacccttctcttctccctattttgaaggggtaacactatagcctttaaagctaaaagggggaggaaagcttccctctggtggtaagcagtttgtgtacatttttccaggaaagcctacccacttttcattcttacagcaccaacctatttctaactcttctggagaattaagccctggataaaacctatacaggcactcctgtataggttttcagggtttcattttggttttagttcttcaaggagtagtaaagaagaaggtagaggtgggaggaagaggagagatagaaacatgaatcttaaaattagtgttcaggggtcaaaatgaattctccatcagcctcaggccatgatggtgtctccctgtctacgtgtggtggtgtgcaggagtgtgggcgtgtgcaggcatatttgattatcagaggtgttgcagctgtgggatatctgtgtcttgttctcccatgtatgtttcataagccaaggtacagatattctgaatagaatggtagatgttcctagcattacttttatgcttgacatgccaagaaatgcttacaactcctttttttgcttttttttctgtcctgttctagaatgaagtcagtttaattagactccaagatggagagttcaggactggagccaggggaagtgcacaggagtgactcctggccccagcactatgcacatttctgtgttcaagggacaaaaccacagcaagctgtcaggtttctgagtgaactgcttacttttccataattgatagataatacagccatgtctttaagagaactcttacagagtttattattatatatggcaatattaatagagaaaaatatttcatgtgatttttagagaacttaagcatttgccttaaatgtttcttaagccctagaaatatagctataatttcattatttatcctctcttaaacagatgattccctggtaaagagaagaaaaacactgtataaagtacagctgtgtgcatctgagtggatgtggggggttctgaacacattgtaatagaaggtacagattttcctctgatagcttggtgagaagagaagactttgagcagtgactaagcactgaatacagaaatttaagaaatatacagaatagggaaactacatttttaactcacagtttagagtacatagagaggtaatagacaaagaggcaatgtttccttaaattaaatcaagtttacaaaaagctatccaggtcagatatacccaagttgaaaataagccctagtgctccaagttgatggtattcacatttggtttttgtccgagttttctcctgtacatattgtaaaacccatcaataattccattgtcatgtgtcctttttcaaacttcaaatatcattttagctacacgtttttctgtttgtttgttttgagacagtttcactcttgtcgcccaggctggagtgcagtggcgccatctcggctcactgcaacctccgcttcccaggttcaagcgattctcttgcctcagcctccctagtagctggaactacaggcatgtgccaccactcctgtctaattttttgtatttttagtagagacagggtttcaccatgttggccaggctggtcttgaactcctgacctcaggtgatccacccgcctcggcctcccaaagtgcagggattacaggcgtgagccaccgcacccggccatttttctttttatacttagcatttctactccattgaatgctaagacacagaagagcagtcatggagttttacaatggaacgaactgaggagatcatgaagccccatggggcccctcattttagagaaatgtcccaggagttagagccattcttctgtggtcacacacctgtaatggtcattattttagtttttatttaccttcctgcttatctgcatatttggggctgtaaagaattttttaaataagtagtctttggtatttttgtttatttaattctgtggcataaattcacagctgctttagcaagttctagattaataaaaataaaattaactgtcacttaaaggagacaggaagaagcggggtttttttgtttgtttgagacagagtctcactctgttgcccaggctggagtgcagtggtgctcactgcttctcgcctcctgggctcaactgatctcccgcctcaacctcccaagtggctgggactacaggagcatgccaccacgtctagctaatttttgtatttttcgtaaagacaaggtttcatcatgttgtccaggctagtcttgaactcttaggctcaagcaatccacccacctctgcctcccaaagtgctgagattacagacatgagccactacatctggccaataggaagaagtcttgaaagaagggagatgatcagaaggaaatgaaaggaagtcactgaaactttaaatttactagaaggaaaataactaaatcccagttttaaaactgtgaaaccgagtttaaaatgtagaaggaatatagacttgctcatagtttgtgtacttggtagaaacaaaattaaaaggagagaagaggtattacttctatatctcattaactttagtgtttatttccaggaaaaaggtcatagatccctgatttggagcatatttgaattagtggtatgttttaatttgaaagtattggactttatagcaatcctttttgcttttgcttattaggggttgtctaatatcacagtccatggtgaaagctcgggaatgaaattccaggttatagaagagaaacaacttagtttgcattagttacttagctttgtaaaacgatgcccttacagcaaacttaaaaatcttgtgcgccttttagccacccgagattcagggcatttgtcctctgaagagaagcctgattttttgcactatccatgtgtcttttctcttgtctccagtcccaaaattgagaacctctacatacatggtgccaaacggtggctttccctcactctgccttatctacctggttggatcaggtttcccctgacccatccagtgagctatcaaagccacttttaactcctttgttagagtgttacaggtggtttccctcttaggcagatgctctgtcctcatgtgaagccattcaatgtgtctactcttctcctgctgtgcctcagacctcttagaccctaagcagagaggatctaattgtgtttgttacagtccaaaagggagcaaccccgtcgatctgcctgtgcctcacgaactgatccttcgactcagcagcagctgccagaaaacagggtcagtgttgtgcagtgcacatggctttgaattccccaggaacactgtgttgaaaggatggctggctcctttcctcagaaggaggcactccggcctttcttagccgatctgttatgctgagctctactcaaaccccagcaacaccaggctctttcattcttctgggctctaccccttaaaactcccacttctgcctggcagtctccctctcacttttgaggactgtgtggaaggatccaattcctctgtgaagccatgagcgtactaaggaagaggactcaactctagagagtgaatttttttttctcccagcctctttggctatcccattgttcccacggactatgatgcattcctttcaaagtactctcatgatgtgccccttagcatcccatccttgccccactgacactcactggcttaggctagaatgaaacaatgttttccccaccttcttcatcccactgttactatacctgattactccaccaaatggatcctgagtattagaatacaaaaataagcaaatgtcggaaccacattttcaagttatttagtagtcaaagataaatcatgggttacagacaagattattttttgagtatctgtgtatgtttcctcccttgcagttagaactatatgttgtgaatagtgtgagagaatgcgctttaaaatattcagaacatttaaaatgtaattttgaaagaaaaaaatttgtaattttgaaaaagctggatggatgcatctggcttggcataaatccaaacttatctttcttccccttttcaatttttattttaaattgtaattttggaactatttgaaaatatttaaaataaaattatatagatgatatctgtgcacctaacaaatgcttgatttttgtttgtttgtttaaataagaaaacattacaaaaatgcatctaaagtacagtccctttccagacttcttcggaaatttgtacagtttttctctggatgtatttttactacatatatatgtatacatgacaacacatagtacgttctaagatagtttttaaaaaccatacgtgaatggtatactaattaaactctttttcaaatagatttttttcagtcagtatatttttgaccaattcatcttgagtcgtatagatgtaattcattaattataattatgttaattatagttaattagaaattcattttatctgctttgtattatttcagtgttggaatttattacaccattttataagtgtttctttggatggatatgtatgttgttagattgttttttgttgttgttttttgagacagagtccggctctgttaccccggctggagttcagtggcacaatcatacctcacccactgcagcctagaactcctggccttaagcgatcctcccacctcagcctcctgagtagctgggactacaggcatgtgccaccatgcctggctaatttttttatttttggtagaaacattgtctcacggtgttgcctggactgatctcaaactcctggactcaaagtgatcctcccacatcagcctcccaaagtgctaggattacaggtgtgagccactgtgcccagctatgtgggtttatgcaagttgttcaattaacagtgtgccaagaatcttcttagacatatctccttatgcaaatatggtaagttttttgaccagataaatgcataggggtttaatgactgaatccgacagtctcttgtctttaatggggaaatttaattcattttcatttagcatgttaatagttattttatacctcagatattgcagcattagttgcagatcactgcaataaaatgagtattgcaataaagtaagtcataccatttttggtttcccagtgcatataaaagttatgtttacattatggtctattaagtgtgcaatcgcattaaatcttaaaaaaaaacagtagacatacctaaatttaaaaatgctggccaggcacaatggtgtacatctgtaatcctagcactttgagaggccgaggtgggagaattgcttgaggccaggagtttgagaccagcctgggcaacatagcaagatcctctctctacaaaaaattttataactagcctggcatggctcgagcttgttgtcctagctacttgggaggccgaggtgggaggatggcttgtgcccaggagctcaaggttccggtgagctatgaccacaccactgcactccagcctgggtgacagagtaaaaccctatttataagaaaaaaaagataaattaaaaataaaaatgctcccaggtgcagtggtatgtgctacagttaatgtagccatgttcgtcagtgatcttagttaaatcttccagataactggctgcagcttctatagcagcacttgctgctacaccttgcccttttgtgttatggagatgacttcttcccttaaaccttatgagctatcctctgctattttcaagcttttcttctgcagcttcatcacctctcccaggcttcacagaattgaagtgagttagtggcttgctctggattagattttggcttaagggaatgttatggctggtttgatcttctacctagaccactcaaactttcagcaataaggctactaatgctttctcatcatttttatgttcatacgagtagcacttttaatttccttcagtaacttttcctttgcattcacaacgtggctaacctggtacgagaggcccagctttcgtcctgtctcagctttccacctgccttcctcattaagcttaatcatttctagcttttgatgtaaagtgagagacatgctactcttcctttcacttcagcacttagaggccattgtaggattattaacccaatttcaatattgttgtatctcaggaaataaggaggccagagaagaaagagatggttagggggaacagcaagtctgtggagcagctaaaatacagacaatatttgttgagtttgctgtcttatataggtgtggttcatggcacctcaaaacaattacaatggtaacatcaaagttcagtaaccacacacagatcgccacaacagatataataatagtgaaaaaatttgaaatattttgagaaatattttataattgtgagaattacaaaaatgtgacacagtaacacatagtgaacacgtgctgttgtaaaaatggtaccaatagagttgcttaatgcagagttgccacagacctcagttaagaaaacctgtaatatatacaaagtgcaataaagcaaagatgaggtatgcctgtactttctgtcaccttttttgtgtatatatgttttctttggccttcttttctcctttactgctttgtagaatttttgtaaccattattttttattgtacttattcaaaagttattcattctgttgagtggttacccatagatgtttaccatgcatttttaacttacgacagtttcagttgagtcagtatttctattctcctaaacaataccagggaccttagaggattctagctgtgacccctcatctttcatgttactgttgtcaggagttatttctacctttttttttaaaaaaaaaaaaagatggtcttgctctgttgcccaggctgaagtgcagtgacatggtcatagctcattgtaacctcaaactcctgggcacaagtgatcttcctgcctcagcctcccaggcagctgggactgcaggagcatgccactgtgcccagctaatatttttattttttgtagagatggagtctcactttgttgcccaagctggtctcaaattcctgggctctggcagtcctcccaccctggcctcccaaagcactaggattacaggcgtgagccaccacatctggcctcacttttttttttttttaaggtcctaaataatcaccattattgccatcagtgtttactgattttctttgctctgtgaaatttattctttcctttttgattcaatttttttcgtaagtagttctttctatgaagggcaatatcttagtctgagtgtcatgttatttgcctttacacttgaataatattttatcaaggcatagaattctagattaacagttatttttcctcagcactttgaagatttattccagagaagtctgctgtggtcccacttttgctcatttgtagggtaatctttttttctttctaggcactttgaaaattttgcattcttccattcactcctacttccttcatttgtttttaatctgtttcatccatctattgtgtttttagtttaaatggctatgtatcttttacttctgaaagttcactgcttgctctttttttattccataacatggaagtattgtcccccccagtgatatagattagatgacagtgatctccaaatttaaccatttgctgtgttgcctttttaagtattctattaaaagcttgcttacagatatatctgtgaggtaatgcctctgggataattattgtctgtgttaaatttctttacctcctaaaacagaagtaaaggtttgcctagtgttctgtgtaagcatcccaaactagtattgttgggggtcatctcaggtaaacatgccttttccacataaagattttggaaggagttgaatttaagctgatttctctttttctaaagaataatttgttgtggggacctccctcgcattataggtaagaattgattgtgttggagtttttgctgtgttttataccacttttctacctgtgtttatagtgagagagttggttctgcttttgttcagtttgccacgttgctagaaccagaagtcagttttttttcctttgaatttgttttgaaaatttgtgatgcttttttattggaaagatgaaagaagttgagcatttggtgactgaatgctttgtttgtgctttctaacctctgtaattgtgggctgtgaaagcatctccccaggctctgggtttgaaggccatctgatggaaccacagagcagttgctttggaaacataatattctaaactggttgtttttctttcccttcaggctttcctaaaatagatacgttattgtgggaaaataggatttggaaaaacacttaagcaacctggcaattgattattgaattttatttgaaaaataactttgtttaccaaaatactttgaaaaggctatttgctgttctttttcccatttagcagaggtatagagcagttgaaacatctggtgaaattagtacttacaagaaatgcctgatcattgcctagaatacttttcactcttagtttccttacaactaaaattccttgctgagaaagaaacttctctcagggcctgaaaggaaacagttagttgtccctagtgtatctgacactgccctgagagaatgcctcacggtagggagaatggagagaaggatgcagctcaaacatccttcattcctcacccacacccaggggaggggaagggaatactttctacagagaggaagccttctggcttgtccagagccaggcctcactcctctaaacttgcccctgcaacacctggagagcttggctctgcagctggtgtagctaggagcacatcactctacagatcctcaactaaagtggacttaactctgcaaagcaggcgtcagtgggtaggctggagaccttcctttaaatgacacaaattatactttggctgggacatccagcaccaccttagccctagttggaagcaaaagtacttaacatttgcctaagatcatagcaaagacagatagtgcctaccttatgtcaggtattgggctaactaatctaatgcttattgcactcttaccatctgctttctacagagggaaagttctgggaggcctgaacagggagaactgctagcataagagggcagggcttgaggattcagggaaaatgccagacatacctgtttcagtttggattgaggacaggctgtttctttgtgttttgttttaaagacttctcaagtgtacagaacctgtcttttttaacttagccaagagtgttacgttcagctataacccaggggtattcctgttcacaaggagaaggaaaaaaaaaaaacacctgtggaggtcatgggtgtgaaattatcttaatgggcatccttatgctctggacatgaaagatttgaaatgtaaaaaccacatgctttgacctggcactccctaatagcactgcgaaaattggccaactaaaccctagaggaaataggtactttcaattttgagtagttcatggttaattttaaaccaaacatctgcggaagaaaaagatgcagctaaaggtctgcttttccacagaattcttcatggacagagtatccctaccatgttcttactaagaattcaaaaacagatgaagaagggcaaagatgcttggaactgctgtttgaggtgcatttggactgagagtcaggattcctttgtgctaatcccagtggtaccaagacctgggccatccttatcacttctcattccctgttttctcattaaaaatacgagcttgtaccagatctaaaaaatacacagttgaggactcacacagaaacaaagctatgaagagggtcaaccctacgtattcttggagattttgcttagaaaagcaccttaggtcctgtgatgtagttgaacttgagtatggatagtctatttttcattactttttaccccatttctgcataggaggtagtaaacatgcagcttcatcaagctcttatcaccagaagcagccagtcttctttggaaaggggttatcttgttgctctgacatcttgggatgctgatgttaatggctgataagggccacccaagatgatgttttcctcctttttctttaagtgtttccagtgaccttgtttcctgagatgtttcagtagcattccagaaagtgccatggaaatggttattatgctaaaggttacaagttgtttgtggttaaatgtgttattagatgggaaaagtcaactcaccgttaaaaatgattcactcctggctgggtgcaggggctcacacctggaatcccagcactttgggtggccaaggcaagcagatcactggagctcaggagtttaagaccagcctgcgcaacatggtgaaaccccatctttacaacaaaaatataaaaattagccgggcatgacagcgtgcacctgtagtctcagctacttgggaggctgaggtaggaggatggcttgagcccaggaagtggaggttgcagtgagctgagattgtgccactgcacaccagcctgagcaacacagccaggccctgtctcaaagaaaaaagattcactccatgaattatgtcatccagaaccaggtgtgaaactcacctacatttttttctttcattgaaaaggtgcatgaaaccatcagggttattgactttatctcatatggagaaaagagcttgtagctaggttttaattatagctctgcacatcctcttggcctaattaaagtttgctttactccaaggaaggaggaagtgtataaagctttgcagtggtactgtttgtatctcagttcctcagaaaaaagcctgcaaataatgcccctgggtggttcttggagttggcagtggtatggaaaatttcgttaggtagtggttagctgtttgtgatggcctgctttttcattatagtatagtcctgtcctctttcgatctgattctcagaagcccaaggtagacagacacctgcccctattttcagtacttcaccttctccagcctactgggtcctctcaccctgtggtgtctacttaacacgcaacttgaagaatttctgggaaattgaccaaaacagctctttggaaagaagctaggcctcagtcccaaagggaaaggtggctgatgtgactttgacttgaggattgtctcctgtgatgtgctcctagtggggctacaggggtcagtcctttgctttgagcacctctgtagtccactacccatggacacattgctatcctctgagggggatggagggagtagagccctctactgctagcccattttatggaggtttgatgagggtcttaggtgaataagcttcaactcaggtccttggtcttggtttgttaaattattctatcctttctgaagccagggagatttgagaatttccatgaccccattatgaaattgatgatgaagagttttcatcttgtgaacagagttcagatgaatatgatcacaaagtcaagcctcgtttaaaatactatgaagctctctttattgctgcacatgaaacattaggcctagatttaggggaaagaattggcagtcttgaactctttgtcatttgtttagcaaatatttgtttgacatctctggtacgctaatccctgtgctggaatatgttgatgcagatgcaggagccacagtcaccacccttcgaaatcttacagaagagcacacaacaggcccattaacaaagggagcatgtgagcaaacagctacaggtcactgcaaggtgagggtagaggaaggagaatagacctcaggctctagtgctcaagggagtaatcatgaagaaaatagaattttaactgaactttgaaggatagataggattttgagagctggagatgggggtacataggtgcagagggcattctagttgaaaagaataaaacagtggtcactgccaacacttatgtttaatcctatgaaccacattgggtgagacaggcattatgtacttcatggtgggagccttatgtttatcccatttgaggactgagaaaactgaagtttaaaatgttggaataccttagctaaggtcacctagcaaaacgtgaaaaagctagggtttaatgggctaatgcccaaacccatgctctttccccttggctactgtgtagcggttaaggaagggcatgtttggagaatgggaagaggtccaatttgtgtgcacgtaggggagaagtgaaagataagcttgggaccacgttgtggaagactaaatacctggacactgcacctaggattcagggtttcattctgaaggcaatgatgactcactggagggttttaaatatggaaatatggaattcagtggtttgaggggcacagcggccccagtggaagtgtggtaggtgtgagtagcagtggagggagtgttgcattgaagcatgacagagctcctacagggaacctcaacaggtggaagaggaatggtgggcctaggtcaagtggagtggcaccgagtgagcagcttcttgtgtgtatacctggtttatgcttcaggagtgaaaaaagttcaccacccaatactgaggtttgagttctttaactaaactccaaagacaacaggtgttttatacatggattcccctgccccatttatgggtggggagagggcaaatggaacgttaggttaactagtttaaagagtcaaggcaatcccacctggatcccttcttaaaaaggaagcctgtgtccaagagtcccttctgctgagttaacaagaccccttcaacccgttctcatctttgggattgaggcgcctgcagaattacaagagaggatttgtcctcctcttctccagagagctaccttgattttccccacccctgccaagatagacattcatgaatgcagtcatccacacctccacaagtgcacacacaccagccatcctattttaaaacagacaaaagcaaaaccaacccaggatgtctctggacaccataaaccaaaatagtcgctggaaaaaacagtgatggtaggttccagatttaagattcataaaatggtaacatttccaaaaatatctctgatgaagacagtcatatgttagtacgtttttaattttgccaagagaggctgctgttttaaaaaagaggatcttttacattgcacgaatttatcttcatgaaaaccttactgcgttgtccttatttttcttattcgcggttgtcccacaaacatttcatcaagaagcaccagtttcctttctgtaccctcaagccacaggaggtagttccttggttccctcctggggtagaaagaagggcagcaaaaagagcactgtgctaagctggcccttccctctccaccccaggtctcaagagtgcatgccagcttcctcccccgacctccaacgcactttggattcagactttgtgtcttgcttcttaggacttctgatcagcctgcatggatcctgcttgactggccatgactttagagagtagtagaagacagaaaagttaatacaccttctaatgaattaccatgtgggtactgatctttcaaagatagtatagaatagtttgttgtgtggtctgtttttaaagtctgttaacatgaagctacagaaatttggaacagaccctttagagataatttagtccaacctcatcattttatagtaaaaacaacaaaagcccacaggaattagctggcttgccccaggtgctgggcctggcactcaagccttcctcctaattccatggctcttcatcatgaactgatgcttctcccatgctaaatccttgtgctcttctttggccatgaaaagcctgttaactctcagtgcttttttatgtgtagaaggtgacaaagcagaaggaaaatggcaagaagaaagataaccaaagaaaaatcagatagaaggcaggatacccagcgtgagtgcagcggctacacccattttttgccatttatttctgatgtcagaccaggtggaaatatcacaaggtgtcttcagatccttgtaatcacctcttgttccctgggggggaatctgtgttgctcgccaagctaaactcttgtgttcaaggacagggaacacaagaattggggtgcagactctacatcacagccctgcagttatcacgggcccattgaggggaggggcccgtgataactgctgggctgtgatgtagagcctgtaccccagttctggggtcctctctgtgacagcatagtgcctactgtgctgcaagtgattctgaggcatgggcacttgtgaagccttcagtttgtgaagcctaattcatggatccggaggattgtacatacaacaacaggaaataatgaagataaagttggactaaattatccctgagcctacagcagtggttctcaaagtatggtttccacatcagcagcatcagtatcacctggaccttgttagacatacaaattctaggcccccagacctactggaacagaaacacccccagggacccatgttttactaactcacccctcaggtaattctggtgctgcacactcaagtttgaggagcactggcttagggaaagcagccagaggcttctgtggggcagagcagggagcctgtgattggcttggtctgggcacttgtgctaggaccaagggggtgacgggctgagggttctgcagagaagcagcgtggtaaaggaaggtctctgagggcagcagcctgggagtgacttttaagcccaccccttaggaaattgagactcaagtcattaaagctttccttttgtttacacttgcctacaattgttttttctcagagcaaacttggctcagcacagcccaaggtaaattatcacagattctgcaactaataaagttcaatgaggactttacatggctcagatgctgttggtgactggctctttcttcttttttagttagtaacaggagtatgggaaggcaaatacaacttcttctgtcagggcacacgcaccgcaggagaatcagatatgaaggtactgtctctttttcagaaactttattattataagtgttgagttttttaaaataaattgtataaaatacaaaatggcccataacctcactgcccaggcaatccctgttgatatttttaaaagaataaaaaaggcaatatatacacatcaaattaaaatttgaatgtgaaaggtataaaataaaacctaaagcatccccctctgtaaaaataactccggttaacaattggcaggaaaaatcacatgcagtcagtatgttatatttacacaatcaggatcataagagcaatgtcttaaatttttaaaatcattcatccaagtacttttttccgagtagtggtgttaaaaataaaatctgacttccactcatgaggtttgttttaaatcacaggccaacagtcgcagctcagcatgggcagtcatctccttagagcacttgtttgacatgtttaattgggcagagacctgacactgcaggttctgattccttttcttctgtgtcacttatcaggtcggctgctccatgttagtccctgaaatcaatagcgtttttcagatggttttcctttgctaatggctgtgcaggctgcttccagagggaataggcagacttcaaggttttgaaccttgagcctcatgtttttgttagtctcaaagagtgtcagggaccctttcaaaaatattccctgtagtcatttcaaacccctccagctgtcccaacccaatcatgttctttggttaaaggtacttggagagtgaccatagctcccagccactgatggacattaagagctcttggggcactcgggcttctccgagttgacatcagatttttggatattagtgaaacatgtcagaggtgatattccagagaagccgtgaggataagccttaaatctttgaccctttcctcttagattatccgtgtcctctggtggtactacttctccaaactcatagaatttatggacactttcttcttcatcctgcgcaagaacaaccaccagatcacggtcctgcacgtctaccaccatgcctcgatgctgaacatctggtggtttgtgatgaactgggtcccctgcggccactgtaagtattagagacggggacttggggaacaggtgtgagcagggaggagagttgaaactaaggctttcagaaaaggtgctgtttctgtaaatgtctaggtcaggctttcagctttgtgttcaagttgcttttaatgatagtttatgtacctatgcacacaaaacccttttttagttaagtgaactttctgtgctgattgggtgagatgagggagataccactggggacatattaaggaataggtacaatattctctgacttagagggcaactttccaggttctttctggtccttctgtatggtgtggaaggtttgagacgggcaggtgaggaaaataggatcacactgttgcatgagtaccagggagcaaggctcattttgaaatacagctttagctgtcatgcattaggaagtctccacatgttctaacaaccctcatattccctgaagcatggtgatcaaggtgtcttctataacgagcaccaaaacttgatataaattttctaaggttgtacttggtttttggaaagcttgtagtccaaagtttcttataattttcagagattgccaccttcagattcagcctgggagttttagcaaatgtctcagtcaaaagtcccgtcatccaaacactgaagaatttaactgagaacctatgggtctatttatggatatttttttctctgggatagcactgcccttgattacctgagcctgctaagattcacagtgtcatggaattccagagctaggaaaaaaaaaaagctttccaaatacagatcctttgggtttgggaggaaactaagaccacagaaaggtgggtagagttggggctttctgctcttcctcccactgtcagagctcatgatggtggattaactgacctaactttctaatagaaacagcccctccctacatttgaagagtgctttaaattttcagagaactttcaggaggacagatttaatcagctccacttgggccatgagaaactgaaccagggaatggatgtgatgtgtccaaagtcaaaagccagttcctatcatagccaggagtagaaacttccctaacaccaggctgtgcacctgcaactgcacagggaaaagccagatggcttggtttggttgctgactgttggggaggaggacagagtctggaaaaagaactagtggtcctactgaacattgaaaatgatgtgataagatggctcttttatctctaaggagctagactcttgactctattattaataaaaatgtatgacctcagcactgcagtcctgggaaataattagaagatggcttcagagacctctccacaccccagcaaatgtatagaaacaaccatttttgagcatattgcccatcagctgtcttccacagccttcagagagcatatttgggcagttgtgcatgtaaagaaaaacagctgtctctgagagtgggtgggcatctgcagcaaagcctgtaggtgctgggatggcgtcgtggcttcagtgtcagatgcccctctagcagctacagctgacccctgggctcggagcctcctggtggctgcctgcccaagtggaaattgaattctcattacacatccatgcattgcttgctgttgcagtgtttgtcagctccgttggaagtcatctctctttctgattcaaaaagaatcttgtattttttttttttttaccacctgttctgtttaaaacactaatacattctccttcccaaatccctctgttcctgcagcttattttggtgccacacttaatagcttcatccacgtcctcatgtactcttactatggtttgtcgtcagtcccttccatgcgtccatacctctggtggaagaagtacatcactcaggggcagctggtgagtgacttggcctctttccccaggacttacttcctggtggatacagacctcttcctggctttagtgttatgtaatagcatctaagatgccccttctccaccctttttcatttgatgtaattaaattccttgaagtgggtagattagggaattttcttgttttgaactgatagtgaactgtgaccatgggcatacagctagttgaattgtacaaagaggtctagaatctaatttgccaacttcaagttcagctcttctgagtttttgcacataagcacatatgcatgtatgtgtgtgtgttttctaattatagtccaaaatccaaaatgaaaattgtatgtttccaggggttttagaaggagctggagagtagtatggagtccagggtatgtgtagcccattactaggcagcaaggatatttgtctggcaggtatggatgacccctcagcccccatgcagtggagcacctgttggtgaggatggcagctgtttgcttcagttaacagctcctcccctggtttactgccagggccaggccacttcacctgatacttctcaccatccttgattaagccttctgcattcatcagtatattataggtaacctctttctctcctctcatgaattcgtctatgaactaattaatactactactgctcatattaaacactgacatttcctaagtgtttagcacatgttgggtactcatactaagtacatgattttacatagattgttccagtagcctgatttcatattattgtccccaagccaggcacagtggctcacgcctgtaatcacagcattttgggaggtcgaggcaggaggatcacttgaggccaggagtttaagaccagcctggggaacatagtgaggccctgtctctaccaaaaagaaaaacacatattattgtccctattttatagatgacactgagtcaataggccaaagctagctgactgaggggtgtggacattaaaccctttgccctgtccttgcattattaacacatttttctaaacacaccaagctgattcagatcccttcaagtcaattatgatttttcaatatttaaaaataacaatctgaaaaaaaagtctgagaaaatcttagagactgaagtgtttgatgtttcattttcacctctctgccagctgctatatggtccttgttaattttttctcacccacctgtgaaaaaggaaaattgttgattaacctccttgttatacttgaggagaaatgatgcagaaattgatttataccacagttttgggtctggcggaagcagaatttaaaagaacagactggcaaagttggtctcccgttaggctctgtactttgaggtggaagattaaacctacccaggttgtcaggatttattttaagcaccactcctagttattcctcagtctgcagtactaaccttaaaaaagagaaggcaaacagccaggcacagtgggtcatggcttggagtcccggtcactcgggaggctgaggtagaaggatctcttgaacctgagagtttgaggccaccctgggcaacatagaccctgtctcaaaaattaaaaacaaaaaactctacatagaaacattggagctgctagaaatacagtgtgcagagcctagccctttttttggggggaggggcaggggttgagctggagtctcgctctgtcaccaggctggagtgcagtggcgcgatctcggttcgctgcaacctctgcctcctgggttcaagcaattctcctatctcagcctcccaagtagctgggactaccggcgtgtgccaccatacccagctaatttttgtatttttagtagagacagggtttcaccattttggccaggatggtgttgatctcttgaccttgtgatccgccagcctcggcctcccaaagtgctggaattacaggcgtgagccaccacgcccggcctgagcctagccctttttaaaacatctttccaccatttctctaaccagttcacatgcgtttcaaggtttattcatcaaaattaatcaatgcacttagtgttgtttgccagtaaaggtttaaatctactcatcagccttcaccaaaccagaagcgtccatggataaggagttggaaggatgtccagccaggtggcacatcctgcagtgatgttatcagtgccctttcaacatacacacttgctcttccttctcaaaaaataaaaacaaaaagtcttggatgtctctatagtgtatccttgaaatttggagaaggtagtttaaatagcttggagggcagaggaagaatatatataagacaaacacacctagagtttaggataagtatagtgtatgtgttgtgttcatgaagtgactgctgtacctgcagcaagggtagtaagtgttaattcagaaatttaggtgatgctggttaaaaagtctgcctggtgtggggcctcgtccatgcactgtccctgttcagctgcatcccctctgttcccctagcttcagtttgtgctgacaatcatccagaccagctgcggggtcatctggccgtgcacattccctcttggttggttgtatttccagattggatacatgatttccctgattgctctcttcacaaacttctacattcaggtaaatctcacccttctctgggacttggaatctggggcctttaccaacaaaggccctcatctatttacttaatgggcatgtggagcccttgctgggtgacaggctctggcctctaatggagtcactatgacaagagcagcccctgcctctggggggctcacagctcactggaagacactagaatcctgttctagagcctgggtgaggaagtcttgggattcccctgggaaatggaaaactgtgcagcaggaccctatgttgcttccctctgacctgcagcagagacgtgagaggtgatttcaatcagaaatctctcagttcactaccctgaacgtcatggccaaatgaaatttcagaagagatttttatcacagtcctcagatatggagatctgcttttttgtcccagctttcttatacattcagtcttcaggtgtgaggattcggttcattcctaagcatatgatgtggtgatgtaggtctttgctcacagaaagatccatttagggcagataatttccagtggagcctgaccacgttgcagccactgctgattctcctgccatgcgtcaccccccagatgacatgtgtcctgcctttgttgccagtgcctggtagccataaggcctgctgatctgggcaaaacacggaggtcaggagcaagggcagaggctgcaagtcccgaggctcagacatttgtcctttcttcttctgtgcccacaagcacctgtgtgtggcatgttgagtttcagtggaagtcatatacttctgggcttcatagtttatggctgcactgtgggacatacaccagctacaaggaaggtgaaaggataggacccgatgaagctgaaatcacatttattctaactacttatagcagcatagcactttgttcatgaaggctgagatagtcgccgaggcagtgaggaacttttgaagacgaacaagggatgtgggtgtcaagagagctgctgccaggtgggaaagaccaatttggccacataacccctgtcatctgccatccagatactaaaaggcaaagcaaagtgtaaattgaattttctatgtgacattttaaatagtatttctgttgcagcctgtgattcagttaacttacctcaggctaagcctcaaaaaaaaaaaggaagaatgattgaaaccagtgacaaaagatttagtcaatgaggacttgacctcaggagtttctccttgataagatttgatcttgaaactaggcctagtgttagggatgcaattctcagtaaagttccctataaagaaaactgtggtcatttggttctcatctgcccttacacattttagacctacaacaagaaaggggcctcccgaaggaaagaccacctgaaggaccaccagaatgggtccatggctgctgtgaatggacacaccaacagcttttcacccctggaaaacaatgtgaagccaaggaagctgcggaaggattgaagtcaaagaattgaaaccctccaaaccacgtcatctgattgtaagcacaatatgagttgtgccccaatgctcgttaacagctgctgtaactagtctggcctacaatagtgtgattcatgtaggacttctttcatcaattcaaaacccctagaaaacgtatacagattatataagtagggataagatttctaacatttctgggctctctgacccctgcgctagactgtggaaagggagtattattatagtatacaacactgctgttgccttattagttataacatgataggtgctgaattgtgattcacaatttaaaaacactgtaatccaaacttttttttttaactgtagatcatgcatgtgattgtaaatgtaaatttgtacaatgttgttatggtagagaaacacacatgccttaaaatttaaaaagcagggcccaaagcttattagtttaaattagggtatgtttcaagtttgtattaatttgtaatagctctgtttagaaaaaatcaaagaccatgatttatgaaactaatgtgacataatttccagtgacttgttgatgtgaaatcagacacggcaccttcagttttgtactattggctttgaatcaagcaggctcaaatctagtggaacagtcagtttaactttttaacagatcttatttttttattttgagtgccactattaatgtaaaaaggggggggctctacagcagtcgtgatgaaacttaaatatatattctttgtcctcgagattttaggaagggtgtagggtgagtaggccatttttaatttctgaagtgctaagtgtttttatacagcaaacaaaaagtcaattttgctttccaccagtgcgagagaggatgtatacttttcaagagagatgattgcctatttaccgtttgacagagtcccgtagatgagcaatggggaactggttgccagggtctaaatttggattgatttatgcactgttatctgttttgacacagatttccttgtaaaatgtgcctagtttaccaaaattaacaaagggggggaaaggaccttagaactttttaaggtaaaatcaaatatagctacagcataagagaatcgagaaatttgatagaggtaacttgtttaatgtaaatctaatagtacttgtaatttctttctgcttagaatctaaagatgtgtttagaacctcttgtttaaaaataatagactgcttatcataaaatcacatctcacacatttgaggcagtggtcaaacaggtaaagcctatgatgtgtgtcattttaaagtgtcggaatttagcctctgaataccttctccattgggggaaagatattcttggaaccactcatgacatatcttagaaggtcattgacaatgtataaactaattgttggtttgatatttatgtaaatatcagtttaccatgctttaattttgcacattcgtactatagggagcctattggttctctattagtcttgtgggttttctgtttgaaaaggagtcatggcatctgtttacatttaccttatcaaacctagaatgtgtatatttataaatgtatgtcttcattgctaggtactaatttgcagatgtctttacatatttcaatacagaaactataacattcaatagtgtgctgtcaaagtgtgcttagctcacctggatatacctacattgttaaatgtctaaacagtaatcattaaaacatttttgattacctgtgcctgcattttacattttttgtgctggcaattctgaagaactggagaaaaatccacttaattcactgtctaggaacttacacaaatggatataaataattcagttaggaaggccatattattgcttagttctcaatgaggaaggaccctgcataataaggcatagtggtggttccaccctaatgctgtcccctctgcctcctccaggtaatcccactaaaggttccagctctaaatatgctcctttgtccttcctccccattggccccaatctctcccgttaccctgagaatgttagaattactttcctaggtctagaccataggtcttctgcaaaatttttttctggaaagaaccagttggaaaatatttcaggctttgcaggacatacagtccctgttgcagccacttgactgtgccatcgtggagcacaaaaacagccatagacaatatgtaaatgaatgggcatggctgtgttctaataaaactttatttacaggcttggaaaacatagcaagacctcatctctacataaaatttttaaaaattaactgggcatggtggtacataccagcagtcccagctactcaggaggatgaggccaaagatcgcctgaacccatgagttcgaagttacggtgagctagggtcatgtgactgcactccagcctgggcaacagagtgagaccccatctctttaaaaaaaaaaattacaaaacagaaggcctgtgcctatagtttgctgacctctactctagagtaatgaggtcccctccccttggacctaaagctcaatcattttatttgccaaagatcattttatgtcccagattgtggcccttcccagcgtaccctacttattttgaatttacaggtacattcacgtctacaacaggagagatgacatggatggtccatcttccttccatctacttcataccatatggtccccagtataggctcttaggtactaaactagaaagcacctaagagccaagactaagcctataccgttttaaatgagtgctcatgaaagtcatgttagttgctgaaattacctgcggatgtgactgcagaattgtcagaactccagagaaatgtcacctaaaactgcatttagtacttgggatattatccagaaggtgtaagaggattgttggggagttgatgggaataaattatatccctgtctttcccctctaagttcagaacaaattgaaaaaatactggaaattagaccagtaggaatcaaaatagcatgtgtcttactaagaaggctggattggtgaaactaagaccacagtgtggctctctaattaacccttgctaataactctattaacctaacttaccagggctcagtagcacaccagtggttgctctgagggttggtctggtgataaagtgattattaaaatatattaaatatcagtcctggaatttacctaccttaaattgtaaactccccttgtggcagattctacactgatgaccttaccatgccaagaaagtgtgcttagctgcacctcccaagcagcaatcaaagtcttccctcctcccgtcagagaagtgagtggataagaggcgagagagagggcagatgtgttctgctgtcctttttcttgtatggaaaagggaggattcccatttctccctctatttttggcagccttgctaatcatgtgaagggcattgtagactaatatgagaagtacaacttggagaccacattggctgggttgaaatcctacctgtatgaccttttggcaagaaaactttgccttagttttctcttctgccaaataggagtaatgttagtttctatgttacagggtccttgtaaggattaaatagatgactaatgatactgtatatataaagcctttggaaccccatctagctcagagtaaagtgtaagtgataacttcaggattgtaatctcaactcaccccactggtctctttcagctgtaagctattgtttcactgttatttccctggttggctgctctagtaatcctatccaaaaaaagggaaggaagttatttcgtgtgacattttctttgttaaatcagtgttgaaaagaaatcagcaattgttaggagtcaaatgttcaccgtctatattattcctgattttgccagagttttacattaagttcaccattctggagtttttagaatctactttggaaaatagggcagtgattatcagtatctggacttcgttcattgtttccctggagttctgacaacaattctgcagtcatatccacaggttgtttcagcgactgacatgtctttcatgagaactcgtttaaaacaggtgtttcctgctatccccttatcactcttggacttcaaatcctaaccaggtttttctttacactctttaatttggaaatgattgtcctcagtggagcagatggagccaaatagtggttgctgtcagttttttgctctgctcttcagcattgcttcattggccattagttcttactccaggcatagatttaaaacctgcttttgttatccttgacatttttgtagtccttatcttctctctttcttcggtatgtttatggctcatgaaaagaaagttcctgggccagtttttgctatagcttgcagaggatgtctggattcgactcttgatcagatcaaggaagacttctggggtggaaattgtaggaacaagcagtgcaggatccagtgaatggctaatgtagtggtgacagagacccagttgtaatgcttccctttctcacataatcaggactctcctgaacagtacctaccaccctgtctgttgccccatttatgttactctgttggccaggcctttgcagaatgtgaccttgttcactgggagagtgcttggtacagaggactgagctaggtgtattgagcaaacagggatctgtgagaaaacaaccggccctcgcaggagcctctactgaattgggatcaaacatacacacatgtgccttctgtgtaaaatggttgtggtgactgccgtaaactggtataaaccagctaccatgagagtccagggagggagaacccttctagcaagggtgggtaagaaaagcactgtaaaggagttggcttttaatctgagcattcagagaccatctgggtttcagtagttggagcctgaaggtgctgggaagacagcattccacatacaggaaccagtatgagcaaatgcatagaaggcccagagggagatgacacactgcactcgagtggatctgtgggtgaaactgcttgttttaaaaatgaggtcaagtgggaagagagtggaatttgtctgggtgttctccttgatgaaatgtgtagaatgttgttcagagctcccagaggaagtagtgattatgtgtaaaggaaccattctgagcagagcctcctgtcactggcctgtgccctagccgtcctgctcccatcaccagcagtgccagggaggagccagaacatgatgataacgagaaccaggactcacattagtctcagttataagctgatggagtcttctgtcagatagggcaggttcaaagggtacctcagacctttgccagaaaattgctcctcaccaaagagatggcatttgaaatctgaaaacgggacccctgatgggatgagtcgggattgaaatcccacattggctcataaacaaatatttcttaaatgattgtgtccacacattcctactggtgttctttgttcaaataatgggcatagatgcaggtttcccttggatgaatttgacaatgttttaaccaagctaccacttttcagcaaattgtgtgctttccccttgacaatgttcccagtgaaacaggtgcctgtttgtaggaaagcatcagcaccaggttccaacaaccttgtgcccttccctgctccccttttttttttttttttaagatggagtctcactctgtcacccaggttggagtacagtggcccaatctcggctcactgcaagctccacctcccgggttcacgctattctgcctcagcctcccgagtagctgggactacaggcacctgccaccacgcccagctaattttttttttttttttttgtatttttagtagacacagggtttcaccatgtttgccaggatggtctcaatctcctgacctcgtgatccgcccgcttcggcctcccaaagtgctgggattacaggtgtgagccactgctcccagcaccctgctcccttattaattgctgtggctctcagtcctccaggaaggctacatggttaggggttgaccaagtcccaactgcctgctgcctgtgccattcctgcagagctccagccctctaggagtactgggttaagtgtattttaaaaccaaggccagggctgggtgtggtggctcatgcctgtaatcccaacagtttgggaggccgaggcaggtggatcacttgaggtcacgagttcgaaaccagactggccaacatggtgaaaccccgtctctactaaaaatacaaaaaattagctgggtatggtggtgcacacctgtaatcccagctactcgggaggctgaagcaggagaatcacttgaacccaggaagaggaggttgcagtgaactgaaatcacgccactgcactccagcctgcctgagcgacagagcaagactctgtctcaaaaaaacaacaacaaggccaaatgtcaccccatgatcttaacaagggaacagtcagaatccaaatcctaagcacacaaagctactttcttaagggcaatgggagagggaaattgtgatggccccaagctagaacctaaattacacctttactttagaactgagtatagaaggatacatatcctagggcacagatgggacacctctgtcgatgctagaagaattctatgtgtgtttggaggtggcatagcatacctgttagaaaggctttgctatttactactgtgggaccacaagcaagttatctcttttctgaacctcagtttcctcaactataaaaaagagatacggatgcttagctaatattgctggaattgaatgcagaaatgaaagaaagcttttagcacagggctttaccctaacaggcacttactgttaagagtggtttattaccaggtaggtaactaagcaaggaagatgtgtgttaatcaatttggcatgagatttaaaattttattacccaacacattattttcactaaagtatccttggttaaaactcagttaatactagcatttaataagataactcaaatttctccaaaaaaatggacaaattggatgtcttcaattcacttgacttacaaaatggttttaatatgagaattgtctagtcataagttgtcactcaagaacaaaaattatctgttctggcactaactggcatgtgattctggtgaggcacatcatgactctgggtctcctctacaaacgagggggttgtgggagtgccctggttccttccatcttgaacattcgtgattccaaagtagcactccagcatagccctgatttacttctagttcctttccttttcaggacattgacataaagtagaacttgcttccaatacgtcttaaaggttaaatgttacacacagcgtacagtcaatgcaaggaggcctgcacacagggaacttctgtctaggactgcggccggtaagaccttcctgtgtggaccacagcactgctcaggaaagctgcctgcaggtgaataagtgaatgtgaaattaagcgagactctctgcaaccgtattcactatatcacactttcatttggcctcttttgcattatttcctaatgtttggagaatacatttgagaaagaatgttacatatttttttacaactcattttacatttacctcaattggggaaaaaattgatgggaggtgatttaaatgtgtttctttatggaatgagatcaagggattaaacagcctcccaagtgtccacactggcccaggatccaagtgagaatagactgtgtcccaggacctgtggtgggacttgaagtttctgaagaagttgaggtaggaatagagtagatgaaagtataaaatttggatagaaggaaaaaaatgaaaggttgatgaaataactgtaccagagaaggagtacttttctagagatagcagtttttctcatgatctgaattaaatagcatggtgttctcagtgaccttccaaattactgagactcactagcaggctcaccagggattcactgctggctcagaaggtgttctagaaagcagtttccagaaggtgttttagaaagaagtcagatgcagagcacctctcaagcatgagacgccaaggtaccttcctcccagtgtctaggtattggcagctctcttccccgttttgcagatgagaaagttgaaatccagagaggataaatgacctgcccaaggtaagtttgacaccagagttcaaatgggctttcctggtccaaagctgatgccaggcattggagctcactaggcagggagacagtacagaaagcgctccctcagacccacccctctagacacaattacagctacagggactcacattgtcctggctaaccaggacaatgtgacatttctaaccaggacaatagtctgtctatggtgacatcaatgtgattgtaaattatttataaagtccacattatctagtgaggatgttccgctcacggattagcgaagagacatagggaaaatccttcaaatactatttcattcattctgtgatgccattgagcaaaagaaactgccaagtcataaaagtaattaccgagtaatacctataaatctaataaacttggccaggcacagtggctcacacctgtaatcccagcactttgggaggccagggcaggtgaatcacctgaggtcaggagttcaagaccagcctgaccaacgtggtgaaaccccacctctactaaaaatacaaaaattagctgggcgtggtgacaggagcctgtaatcccagctacttgggaggctgatgcaagagaattgcttgaacctgggaggcagaggttgcaatgagccgagatggcgccaccgccctccggcctgggtgacaaagtgagacgtcatctaaaaaaaaaaataataaactttttttgagataacacattacatgtttgtaattctgtatttaaaaactgagtagtatcatgtttatacaactatgtagcactttttaaataataagagtgaagcttctgagattaagctcctgccagacattaaagacagttcaaaatcattttggccatggttaggtctacagaatctcagaagcatgctgctctccccaacccttgcttgcaatcctgcagcattcaccgagggccttcgcagctccaggcatcttgccagtgctggggaaacaacaaatgaaaagataacctcattttgggtgaaggacaaagacaattacaaattataggaagtatgctgacggcaacaatcagaattctgatgtgagaataatctcttaggtacttgtaaagataatttggaggcacgtcaaaagatactggagttttacctatgtggttaaatgggtagttcctattgtctcaaccaaataagatattcctggaagtttcacatctctaaaaaattatctggaagcttctgattatctgaagcttctgttctccacctaaatgatagtccgccattcatgagtcaggcctacgcttggccctaacaattctgtgagcactcagagacttagcaattcccactgccttcagctgcattgttcctgtgtgatgggcaactgatgacttttcagtttagtcctgaatcgcagtgtgatctctttgagagttacaaggatccaaatgtgagtgaaatgcacagaatggtagtacatgccaacggtaactgaggacagatggatcaatggatgattttcatgcgtgacaatggcagatgcacaatgacaggtatggacaagtacctcattgtcctgcctggcagctggcgaagttcctttataaggataagacaaatctccattcagaaagtctaaaagtggggctgtgtgttataatctcacttcatcctggaagatagagtgtatattctaaacaacccacttgattccaagacacttgagggcaggaattgtctcatttgtctctgcatccctgtagtgtgcccagcactgaatacatagcagatgttcaataaatgttttgatgaatgaatggaagtatttgggaaatattagtgtggtgcataacggggaaaacaagctttccagctgtatcagtccatttgcacactgctgtaaagatactacgcaagactgggtaatttataaacaaaagaggtttaattgactcacagttctgcatggctgtggaggcctcaggaagcttacaatcatggcagaaggggaagtaggcatgtcttaacatggcagcagacgagagcgtgtgaaggaagtgaagggggaagggcctcttatgaaaccttatcagatctcgtgagaagttactatcatgagaacagcatggaggaaaccaaccccatgatccaatcgcctcccaccaggtcccaccctcaacacatgggggattatggggattacaattcaagatgagattctggtgggaacacagagccaaaccatatcaccagccaattagatcagagatgaaatcctgccatcactcaataaccatgtgcccttgttaagttacctaacctcctaaacctcagcatggttctaggattcaagaaaatagatacagaccatatggtctccaggggggtctcttagaattatgatccccacgcaacagttaatggtcacatgaggccataaaaacctgctggtggcacagtgggaataacattctgttaaaaatcccatcagcttctagtggacccagagtgccagaacagctcatctgaatcatgaaacctccaggagggtgggtcttgcagccacagggaccttatcacaggacccacagcttctccccagaatccctaattaaatgcttccagttccctggcaatctaaggttgtagctcctgggatcagggactgcaaaagtctaatgaatcagctcttcagatggagcaggaccaaggcccccttgaggtcactagcttgcctgtgtctgggagccacctctaggcacttgcttcacggagaataaaatcctatgcctttccatggcctacaggctcctggagctggccctgacccctctcacatgtcccatcctcttccttgctcaccacattcagctgccctcacctcttgcctggttctctagaggagccacttccatctcaaggcctttgttctcacctccagatgtttatttgcatggcttgtccctgcacttaaatgccaccttcccagagaggcctccccaactaccagatctaaaatatcattcctcacatccctccccacacacacctctctttgacttggctttatttttctctgtaatatttccattgtgttgtatctatattgaaatcaagggctttttcttttgcctgccacataggagagtctcaaatattagaataaatgaatttgtgaatgaatgaacatgagatgattaacgttgatgttgcccaaaccctcccttgtgggagctgtaaccttatctcacatatgaagggcactgtgtttttaatagccctgaggttgtcagtaggacatcttaatcatctcagaaaagtggacccagacatatttcggaacagagcatatgatggtgaaccatcaaatcccaccaatgttaagaattaatgagctttctgttctcctatgaagttaatgtataaatttgctgctctgtacctttcacatttagaactgaagacaaaaataattgtgaaggtgaaggatggcattggaaactatttttagaaccctgcaacaactgagattttttttaaaggcactcagtctaaccttatttgattttatgacctctcttaactgttcctcagattatagcttgggactaa

SEQ ID NO: 1132 - DNA, 2835 bp, Homo sapiens
cgaggggccaaccccggcctaggctctccaccgcatcggattctggaatttacgatcacgaaagttctattgtcccgcgattggctcccgggccgcatgacatcatagcgcttgattcatccttcgggtcccgattggctggccgcgccattgtgacgtcacggtcagcccacgttctgattgtagatagccggcgccttcctcttcccatcgcgcgggtcctagccaccggtgtctccttctacatccgcctctgcgccggctgccacccgcgctccctccgccgccgccgccttgctgctgctcaaagctgctgccgccccttgggctaaaaggttttcaaatggaacattttgatgcatcacttagtacctatttcaaggcattgctaggccctcgagatactagagtaaaaggatggtttcttctggacaattatatacccacatttatctgctctgtcatatatttactaattgtatggctgggaccaaaatacatgaggaataaacagccattctcttgccgggggattttagtggtgtataaccttggactcacactgctgtctctgtatatgttctgtgagttagtaacaggagtatgggaaggcaaatacaacttcttctgtcagggcacacgcaccgcaggagaatcagatatgaagattatccgtgtcctctggtggtactacttctccaaactcatagaatttatggacactttcttcttcatcctgcgcaagaacaaccaccagatcacggtcctgcacgtctaccaccatgcctcgatgctgaacatctggtggtttgtgatgaactgggtcccctgcggccactcttattttggtgccacacttaatagcttcatccacgtcctcatgtactcttactatggtttgtcgtcagtcccttccatgcgtccatacctctggtggaagaagtacatcactcaggggcagctgcttcagtttgtgctgacaatcatccagaccagctgcggggtcatctggccgtgcacattccctcttggttggttgtatttccagattggatacatgatttccctgattgctctcttcacaaacttctacattcagacctacaacaagaaaggggcctcccgaaggaaagaccacctgaaggaccaccagaatgggtccatggctgctgtgaatggacacaccaacagcttttcacccctggaaaacaatgtgaagccaaggaagctgcggaaggattgaagtcaaagaattgaaaccctccaaaccacgtcatctgattgtaagcacaatatgagttgtgccccaatgctcgttaacagctgctgtaactagtctggcctacaatagtgtgattcatgtaggacttctttcatcaattcaaaacccctagaaaacgtatacagattatataagtagggataagatttctaacatttctgggctctctgacccctgcgctagactgtggaaagggagtattattatagtatacaacactgctgttgccttattagttataacatgataggtgctgaattgtgattcacaatttaaaaacactgtaatccaaacttttttttttaactgtagatcatgcatgtgattgtaaatgtaaatttgtacaatgttgttatggtagagaaacacacatgccttaaaatttaaaaagcagggcccaaagcttattagtttaaattagggtatgtttcaagtttgtattaatttgtaatagctctgtttagaatgtgaaatcagacacggcaccttcagttttgtactattggctttgaatcaagcaggctcaaatctagtggaacagtcagtttaactttttaacagatcttatttttttattttgagtgccactattaatgtaaaaaggggggggctctacagcagtcgtgatgaaacttaaatatatattctttgtcctcgagattttaggaagggtgtagggtgagtaggccatttttaatttctgaagtgctaagtgtttttatacagcaaacaaaaagtcaattttgctttccaccagtgcgagagaggatgtatacttttcaagagatggattgatttatgcactgttatctgttttgacacagatttccttgtaaaatgtgcctagtttaccaaaattaacaaagggggggaaaggaccttagaactttttaaggtaaaatcaaatatagctacagcataagagaatcgagaaatttgatagaggtaacttgtttaatgtaaatctaatagtacttgtaatttctttctgcttagaatctaaagatgtgtttagaacctcttgtttaaaaataatagactgcttatcataaaatcacatctcacacatttgaggcagtggtcaaacaggtaaagcctatgatgtgtgtcattttaaagtgtcggaatttagcctctgaataccttctccattgggggaaagatattcttggaaccactcatgacatatcttagaaggtcattgacaatgtataaactaattgttggtttgatatttatgtaaatatcagtttaccatgctttaattttgcacattcgtactatagggagcctattggttctctattagtcttgtgggttttctgtttgaaaaggagtcatggcatctgtttacatttaccttatcaaacctagaatgtgtatatttataaatgtatgtcttcattgctaggtactaatttgcagatgtctttacatatttcaatacagaaactataacattcaatagtgtgctgtcaaagtgtgcttagctcacctggatatacctacattgttaaatgtctaaacagtaatcattaaaacatttttgatta

SEQ ID NO: 1133 - protein, 299 aa, Homo sapiens
MEHFDASLSTYFKALLGPRDTRVKGWFLLDNYIPTFICSVIYLLIVWLGPKYMRNKQPFSCRGILVVYNLGLTLLSLYMFCELVTGVWEGKYNFFCQGTRTAGESDMKIIRVLWWYYFSKLIEFMDTFFFILRKNNHQITVLHVYHHASMLNIWWFVMNWVPCGHSYFGATLNSFIHVLMYSYYGLSSVPSMRPYLWWKKYITQGQLLQFVLTIIQTSCGVIWPCTFPLGWLYFQIGYMISLIALFTNFYIQTYNKKGASRRKDHLKDHQNGSMAAVNGHTNSFSPLENNVKPRKLRKD

SEQ ID NO: 1134 - DNA, 805 bp, Homo sapiens
cgaggggccaaccccggcctaggctctccaccgcatcggattctggaatttacgatcacgaaagttctattgtcccgcgattggctcccgggccgcatgacatcatagcgcttgattcatccttcgggtcccgattggctggccgcgccattgtgacgtcacggtcagcccacgttctgattgtagatagccggcgccttcctcttcccatcgcgcgggtcctagccaccggtgtctccttctacatccgcctctgcgccggctgccacccgcgctccctccgccgccgccgccttgctgctgctcaaagctgctgccgccccttgggctaaaaggttttcaaatggaacattttgatgcatcacttagtacctatttcaaggcattgctaggccctcgaggtatcagcagctctgtcctcagaatgggtcccccacttcacacagttgtaggatggctacagcagctccaagcagcacattcagaggaagaagaaaaaatgtttcatttgtgtggttttaagcataaagaagttgtttcccagagctctttgccagctgtcatccctcaaaactcactggccacaattgcttcacatgcccctgcctgaaccagccaccagagggggttaggaccaccacagattgactagatcctaaggattctctacctggggctggagttcgggtcaggtgcccgggaagcactgtgcggtgtgggaggatgaatatgtgccaatttggaaagatgagtatttgtgggaaaatgaataaagcaaagtgtaaatcagaggtttaagttaaaa

SEQ ID NO: 1135 - protein, 88 aa, Homo sapiens
MEHFDASLSTYFKALLGPRGISSSVLRMGPPLHTVVGWLQQLQAAHSEEEEKMFHLCGFKHKEVVSQSSLPAVIPQNSLATIASHAPA

SEQ ID NO: 1136 - DNA, 3107 bp, Homo sapiens
cgaggggccaaccccggcctaggctctccaccgcatcggattctggaatttacgatcacgaaagttctattgtcccgcgattggctcccgggccgcatgacatcatagcgcttgattcatccttcgggtcccgattggctggccgcgccattgtgacgtcacggtcagcccacgttctgattgtagatagccggcgccttcctcttcccatcgcgcgggtcctagccaccggtgtctccttctacatccgcctctgcgccggctgccacccgcgctccctccgccgccgccgccttgctgctgctcaaagctgctgccgccccttgggctaaaaggttttcaaatggaacattttgatgcatcacttagtacctatttcaaggcattgctaggccctcgagatactagagtaaaaggatggtttcttctggacaattatatacccacatttatctgctctgtcatatatttactaattgtatggctgggaccaaaatacatgaggaataaacagccattctcttgccgggggattttagtggtgtataaccttggactcacactgctgtctctgtatatgttctgtgagaatgaagtcagtttaattagactccaagatggagagttcaggactggagccaggggaagtgcacaggagtgactcctggccccagcactatgcacatttctgtgttcaagggacaaaaccacagcaagctgtcagttagtaacaggagtatgggaaggcaaatacaacttcttctgtcagggcacacgcaccgcaggagaatcagatatgaagattatccgtgtcctctggtggtactacttctccaaactcatagaatttatggacactttcttcttcatcctgcgcaagaacaaccaccagatcacggtcctgcacgtctaccaccatgcctcgatgctgaacatctggtggtttgtgatgaactgggtcccctgcggccactcttattttggtgccacacttaatagcttcatccacgtcctcatgtactcttactatggtttgtcgtcagtcccttccatgcgtccatacctctggtggaagaagtacatcactcaggggcagctgcttcagtttgtgctgacaatcatccagaccagctgcggggtcatctggccgtgcacattccctcttggttggttgtatttccagattggatacatgatttccctgattgctctcttcacaaacttctacattcagacctacaacaagaaaggggcctcccgaaggaaagaccacctgaaggaccaccagaatgggtccatggctgctgtgaatggacacaccaacagcttttcacccctggaaaacaatgtgaagccaaggaagctgcggaaggattgaagtcaaagaattgaaaccctccaaaccacgtcatctgattgtaagcacaatatgagttgtgccccaatgctcgttaacagctgctgtaactagtctggcctacaatagtgtgattcatgtaggacttctttcatcaattcaaaacccctagaaaacgtatacagattatataagtagggataagatttctaacatttctgggctctctgacccctgcgctagactgtggaaagggagtattattatagtatacaacactgctgttgccttattagttataacatgataggtgctgaattgtgattcacaatttaaaaacactgtaatccaaacttttttttttaactgtagatcatgcatgtgattgtaaatgtaaatttgtacaatgttgttatggtagagaaacacacatgccttaaaatttaaaaagcagggcccaaagcttattagtttaaattagggtatgtttcaagtttgtattaatttgtaatagctctgtttagaaaaaatcaaagaccatgatttatgaaactaatgtgacataatttccagtgacttgttgatgtgaaatcagacacggcaccttcagttttgtactattggctttgaatcaagcaggctcaaatctagtggaacagtcagtttaactttttaacagatcttatttttttattttgagtgccactattaatgtaaaaaggggggggctctacagcagtcgtgatgaaacttaaatatatattctttgtcctcgagattttaggaagggtgtagggtgagtaggccatttttaatttctgaagtgctaagtgtttttatacagcaaacaaaaagtcaattttgctttccaccagtgcgagagaggatgtatacttttcaagagagatgattgcctatttaccgtttgacagagtcccgtagatgagcaatggggaactggttgccagggtctaaatttggattgatttatgcactgttatctgttttgacacagatttccttgtaaaatgtgcctagtttaccaaaattaacaaagggggggaaaggaccttagaactttttaaggtaaaatcaaatatagctacagcataagagaatcgagaaatttgatagaggtaacttgtttaatgtaaatctaatagtacttgtaatttctttctgcttagaatctaaagatgtgtttagaacctcttgtttaaaaataatagactgcttatcataaaatcacatctcacacatttgaggcagtggtcaaacaggtaaagcctatgatgtgtgtcattttaaagtgtcggaatttagcctctgaataccttctccattgggggaaagatattcttggaaccactcatgacatatcttagaaggtcattgacaatgtataaactaattgttggtttgatatttatgtaaatatcagtttaccatgctttaattttgcacattcgtactatagggagcctattggttctctattagtcttgtgggttttctgtttgaaaaggagtcatggcatctgtttacatttaccttatcaaacctagaatgtgtatatttataaatgtatgtcttcattgctaggtactaatttgcagatgtctttacatatttcaatacagaaactataacattcaatagtgtgctgtcaaagtgtgcttagctcacctggatatacctacattgttaaatgtctaaacagtaatcattaaaacatttttgattacctgtg

SEQ ID NO: 1137 - protein, 193 aa, Homo sapiens
MKIIRVLWWYYFSKLIEFMDTFFFILRKNNHQITVLHVYHHASMLNIWWFVMNWVPCGHSYFGATLNSFIHVLMYSYYGLSSVPSMRPYLWWKKYITQGQLLQFVLTIIQTSCGVIWPCTFPLGWLYFQIGYMISLIALFTNFYIQTYNKKGASRRKDHLKDHQNGSMAAVNGHTNSFSPLENNVKPRKLRKD

SEQ ID NO: 1138 - DNA, 2972 bp, Homo sapiens
cgaggggccaaccccggcctaggctctccaccgcatcggattctggaatttacgatcacgaaagttctattgtcccgcgattggctcccgggccgcatgacatcatagcgcttgattcatccttcgggtcccgattggctggccgcgccattgtgacgtcacggtcagcccacgttctgattgtagatagccggcgccttcctcttcccatcgcgcgggtcctagccaccggtgtctccttctacatccgcctctgcgccggctgccacccgcgctccctccgccgccgccgccttgctgctgctcaaagctgctgccgccccttgggctaaaaggttttcaaatggaacattttgatgcatcacttagtacctatttcaaggcattgctaggccctcgagatactagagtaaaaggatggtttcttctggacaattatatacccacatttatctgctctgtcatatatttactaattgtatggctgggaccaaaatacatgaggaataaacagccattctcttgccgggggattttagtggtgtataaccttggactcacactgctgtctctgtatatgttctgtgagttagtaacaggagtatgggaaggcaaatacaacttcttctgtcagggcacacgcaccgcaggagaatcagatatgaagattatccgtgtcctctggtggtactacttctccaaactcatagaatttatggacactttcttcttcatcctgcgcaagaacaaccaccagatcacggtcctgcacgtctaccaccatgcctcgatgctgaacatctggtggtttgtgatgaactgggtcccctgcggccactcttattttggtgccacacttaatagcttcatccacgtcctcatgtactcttactatggtttgtcgtcagtcccttccatgcgtccatacctctggtggaagaagtacatcactcaggggcagctgcttcagtttgtgctgacaatcatccagaccagctgcggggtcatctggccgtgcacattccctcttggttggttgtatttccagattggatacatgatttccctgattgctctcttcacaaacttctacattcagacctacaacaagaaaggggcctcccgaaggaaagaccacctgaaggaccaccagaatgggtccatggctgctgtgaatggacacaccaacagcttttcacccctggaaaacaatgtgaagccaaggaagctgcggaaggattgaagtcaaagaattgaaaccctccaaaccacgtcatctgattgtaagcacaatatgagttgtgccccaatgctcgttaacagctgctgtaactagtctggcctacaatagtgtgattcatgtaggacttctttcatcaattcaaaacccctagaaaacgtatacagattatataagtagggataagatttctaacatttctgggctctctgacccctgcgctagactgtggaaagggagtattattatagtatacaacactgctgttgccttattagttataacatgataggtgctgaattgtgattcacaatttaaaaacactgtaatccaaacttttttttttaactgtagatcatgcatgtgattgtaaatgtaaatttgtacaatgttgttatggtagagaaacacacatgccttaaaatttaaaaagcagggcccaaagcttattagtttaaattagggtatgtttcaagtttgtattaatttgtaatagctctgtttagaaaaaatcaaagaccatgatttatgaaactaatgtgacataatttccagtgacttgttgatgtgaaatcagacacggcaccttcagttttgtactattggctttgaatcaagcaggctcaaatctagtggaacagtcagtttaactttttaacagatcttatttttttattttgagtgccactattaatgtaaaaaggggggggctctacagcagtcgtgatgaaacttaaatatatattctttgtcctcgagattttaggaagggtgtagggtgagtaggccatttttaatttctgaagtgctaagtgtttttatacagcaaacaaaaagtcaattttgctttccaccagtgcgagagaggatgtatacttttcaagagagatgattgcctatttaccgtttgacagagtcccgtagatgagcaatggggaactggttgccagggtctaaatttggattgatttatgcactgttatctgttttgacacagatttccttgtaaaatgtgcctagtttaccaaaattaacaaagggggggaaaggaccttagaactttttaaggtaaaatcaaatatagctacagcataagagaatcgagaaatttgatagaggtaacttgtttaatgtaaatctaatagtacttgtaatttctttctgcttagaatctaaagatgtgtttagaacctcttgtttaaaaataatagactgcttatcataaaatcacatctcacacatttgaggcagtggtcaaacaggtaaagcctatgatgtgtgtcattttaaagtgtcggaatttagcctctgaataccttctccattgggggaaagatattcttggaaccactcatgacatatcttagaaggtcattgacaatgtataaactaattgttggtttgatatttatgtaaatatcagtttaccatgctttaattttgcacattcgtactatagggagcctattggttctctattagtcttgtgggttttctgtttgaaaaggagtcatggcatctgtttacatttaccttatcaaacctagaatgtgtatatttataaatgtatgtcttcattgctaggtactaatttgcagatgtctttacatatttcaatacagaaactataacattcaatagtgtgctgtcaaagtgtgcttagctcacctggatatacctacattgttaaatgtctaaacagtaatcattaaaacatttttgattacctgtg

SEQ ID NO: 1139 - protein, 299 aa, Homo sapiens; identical to SEQ ID NO: 1133

SEQ ID NO: 1140 - DNA, 3202 bp, Homo sapiens
cgaggggccaaccccggcctaggctctccaccgcatcggattctggaatttacgatcacgaaagttctattgtcccgcgattggctcccgggccgcatgacatcatagcgcttgattcatccttcgggtcccgattggctggccgcgccattgtgacgtcacggtcagcccacgttctgattgtagatagccggcgccttcctcttcccatcgcgcgggtcctagccaccggtgtctccttctacatccgcctctgcgccggctgccacccgcgctccctccgccgccgccgccttgctgctgctcaaagctgctgccgccccttgggctaaaaggttttcaaatggaacattttgatgcatcacttagtacctatttcaaggcattgctaggccctcgagatactagagtaaaaggatggtttcttctggacaattatatacccacatttatctgctctgtcatatatttactaattgtatggctgggaccaaaatacatgaggaataaacagccattctcttgccgggggattttagtggtgtataaccttggactcacactgctgtctctgtatatgttctgtgagaatgaagtcagtttaattagactccaagatggagagttcaggactggagccaggggaagtgcacaggagtgactcctggccccagcactatgcacatttctgtgttcaagggacaaaaccacagcaagctgtcagatgattccctggtaaagagaagaaaaacactgtataaagtacagctgtgtgcatctgagtggatgtggggggttctgaacacattgtaatagaagttagtaacaggagtatgggaaggcaaatacaacttcttctgtcagggcacacgcaccgcaggagaatcagatatgaagattatccgtgtcctctggtggtactacttctccaaactcatagaatttatggacactttcttcttcatcctgcgcaagaacaaccaccagatcacggtcctgcacgtctaccaccatgcctcgatgctgaacatctggtggtttgtgatgaactgggtcccctgcggccactcttattttggtgccacacttaatagcttcatccacgtcctcatgtactcttactatggtttgtcgtcagtcccttccatgcgtccatacctctggtggaagaagtacatcactcaggggcagctgcttcagtttgtgctgacaatcatccagaccagctgcggggtcatctggccgtgcacattccctcttggttggttgtatttccagattggatacatgatttccctgattgctctcttcacaaacttctacattcagacctacaacaagaaaggggcctcccgaaggaaagaccacctgaaggaccaccagaatgggtccatggctgctgtgaatggacacaccaacagcttttcacccctggaaaacaatgtgaagccaaggaagctgcggaaggattgaagtcaaagaattgaaaccctccaaaccacgtcatctgattgtaagcacaatatgagttgtgccccaatgctcgttaacagctgctgtaactagtctggcctacaatagtgtgattcatgtaggacttctttcatcaattcaaaacccctagaaaacgtatacagattatataagtagggataagatttctaacatttctgggctctctgacccctgcgctagactgtggaaagggagtattattatagtatacaacactgctgttgccttattagttataacatgataggtgctgaattgtgattcacaatttaaaaacactgtaatccaaacttttttttttaactgtagatcatgcatgtgattgtaaatgtaaatttgtacaatgttgttatggtagagaaacacacatgccttaaaatttaaaaagcagggcccaaagcttattagtttaaattagggtatgtttcaagtttgtattaatttgtaatagctctgtttagaaaaaatcaaagaccatgatttatgaaactaatgtgacataatttccagtgacttgttgatgtgaaatcagacacggcaccttcagttttgtactattggctttgaatcaagcaggctcaaatctagtggaacagtcagtttaactttttaacagatcttatttttttattttgagtgccactattaatgtaaaaaggggggggctctacagcagtcgtgatgaaacttaaatatatattctttgtcctcgagattttaggaagggtgtagggtgagtaggccatttttaatttctgaagtgctaagtgtttttatacagcaaacaaaaagtcaattttgctttccaccagtgcgagagaggatgtatacttttcaagagagatgattgcctatttaccgtttgacagagtcccgtagatgagcaatggggaactggttgccagggtctaaatttggattgatttatgcactgttatctgttttgacacagatttccttgtaaaatgtgcctagtttaccaaaattaacaaagggggggaaaggaccttagaactttttaaggtaaaatcaaatatagctacagcataagagaatcgagaaatttgatagaggtaacttgtttaatgtaaatctaatagtacttgtaatttctttctgcttagaatctaaagatgtgtttagaacctcttgtttaaaaataatagactgcttatcataaaatcacatctcacacatttgaggcagtggtcaaacaggtaaagcctatgatgtgtgtcattttaaagtgtcggaatttagcctctgaataccttctccattgggggaaagatattcttggaaccactcatgacatatcttagaaggtcattgacaatgtataaactaattgttggtttgatatttatgtaaatatcagtttaccatgctttaattttgcacattcgtactatagggagcctattggttctctattagtcttgtgggttttctgtttgaaaaggagtcatggcatctgtttacatttaccttatcaaacctagaatgtgtatatttataaatgtatgtcttcattgctaggtactaatttgcagatgtctttacatatttcaatacagaaactataacattcaatagtgtgctgtcaaagtgtgcttagctcacctggatatacctacattgttaaatgtctaaacagtaatcattaaaacatttttgattacctgtg

SEQ ID NO: 1141 - protein, 193 aa, Homo sapiens; identical to SEQ ID NO: 1137

SEQ ID NO: 1142 - DNA, 2847 bp, Homo sapiens
cgaggggccaaccccggcctaggctctccaccgcatcggattctggaatttacgatcacgaaagttctattgtcccgcgattggctcccgggccgcatgacatcatagcgcttgattcatccttcgggtcccgattggctggccgcgccattgtgacgtcacggtcagcccacgttctgattgtagatagccggcgccttcctcttcccatcgcgcgggtcctagccaccggtgtctccttctacatccgcctctgcgccggctgccacccgcgctccctccgccgccgccgccttgctgctgctcaaagctgctgccgccccttgggctaaaaggttttcaaatggaacattttgatgcatcacttagtacctatttcaaggcattgctaggccctcgagatactagagtaaaaggatggtttcttctggacaattatatacccacatttatctgctctgtcatatatttactaattgtatggctgggaccaaaatacatgaggaataaacagccattctcttgccgggggattttagtggtgtataaccttggactcacactgctgtctctgtatatgttctgtgagttagtaacaggagtatgggaaggcaaatacaacttcttctgtcagggcacacgcaccgcaggagaatcagatatgaagattatccgtgtcctctggtggtactacttctccaaactcatagaatttatggacactttcttcttcatcctgcgcaagaacaaccaccagatcacggtcctgcacgtctaccaccatgcctcgatgctgaacatctggtggtttgtgatgaactgggtcccctgcggccactcttcagtttgtgctgacaatcatccagaccagctgcggggtcatctggccgtgcacattccctcttggttggttgtatttccagattggatacatgatttccctgattgctctcttcacaaacttctacattcagacctacaacaagaaaggggcctcccgaaggaaagaccacctgaaggaccaccagaatgggtccatggctgctgtgaatggacacaccaacagcttttcacccctggaaaacaatgtgaagccaaggaagctgcggaaggattgaagtcaaagaattgaaaccctccaaaccacgtcatctgattgtaagcacaatatgagttgtgccccaatgctcgttaacagctgctgtaactagtctggcctacaatagtgtgattcatgtaggacttctttcatcaattcaaaacccctagaaaacgtatacagattatataagtagggataagatttctaacatttctgggctctctgacccctgcgctagactgtggaaagggagtattattatagtatacaacactgctgttgccttattagttataacatgataggtgctgaattgtgattcacaatttaaaaacactgtaatccaaacttttttttttaactgtagatcatgcatgtgattgtaaatgtaaatttgtacaatgttgttatggtagagaaacacacatgccttaaaatttaaaaagcagggcccaaagcttattagtttaaattagggtatgtttcaagtttgtattaatttgtaatagctctgtttagaaaaaatcaaagaccatgatttatgaaactaatgtgacataatttccagtgacttgttgatgtgaaatcagacacggcaccttcagttttgtactattggctttgaatcaagcaggctcaaatctagtggaacagtcagtttaactttttaacagatcttatttttttattttgagtgccactattaatgtaaaaaggggggggctctacagcagtcgtgatgaaacttaaatatatattctttgtcctcgagattttaggaagggtgtagggtgagtaggccatttttaatttctgaagtgctaagtgtttttatacagcaaacaaaaagtcaattttgctttccaccagtgcgagagaggatgtatacttttcaagagagatgattgcctatttaccgtttgacagagtcccgtagatgagcaatggggaactggttgccagggtctaaatttggattgatttatgcactgttatctgttttgacacagatttccttgtaaaatgtgcctagtttaccaaaattaacaaagggggggaaaggaccttagaactttttaaggtaaaatcaaatatagctacagcataagagaatcgagaaatttgatagaggtaacttgtttaatgtaaatctaatagtacttgtaatttctttctgcttagaatctaaagatgtgtttagaacctcttgtttaaaaataatagactgcttatcataaaatcacatctcacacatttgaggcagtggtcaaacaggtaaagcctatgatgtgtgtcattttaaagtgtcggaatttagcctctgaataccttctccattgggggaaagatattcttggaaccactcatgacatatcttagaaggtcattgacaatgtataaactaattgttggtttgatatttatgtaaatatcagtttaccatgctttaattttgcacattcgtactatagggagcctattggttctctattagtcttgtgggttttctgtttgaaaaggagtcatggcatctgtttacatttaccttatcaaacctagaatgtgtatatttataaatgtatgtcttcattgctaggtactaatttgcagatgtctttacatatttcaatacagaaactataacattcaatagtgtgctgtcaaagtgtgcttagctcacctggatatacctacattgttaaatgtctaaacagtaatcattaaaacatttttgattacctgtg

SEQ ID NO: 1143 - protein, 262 aa, Homo sapiens
MEHFDASLSTYFKALLGPRDTRVKGWFLLDNYIPTFICSVIYLLIVWLGPKYMRNKQPFSCRGILVVYNLGLTLLSLYMFCELVTGVWEGKYNFFCQGTRTAGESDMKIIRVLWWYYFSKLIEFMDTFFFILRKNNHQITVLHVYHHASMLNIWWFVMNWVPCGHSSVCADNHPDQLRGHLAVHIPSWLVVFPDWIHDFPDCSLHKLLHSDLQQERGLPKERPPEGPPEWVHGCCEWTHQQLFTPGKQCEAKEAAEGLKSKN

SEQ ID NO: 1144 - DNA, 204 bp, Homo sapiens
tcagatactagagtaaaaggatggtttcttctggacaattatatacccacatttatctgctctgtcatatatttactaattgtatggctgggaccaaaatacatgaggaataaacagccattctcttgccgggggattttagtggtgtataaccttggactcacactgctgtctctgtatatgttctgtgaggtaagtcaaagg

SEQ ID NO: 1145 - protein, 34 aa, Homo sapiens
MRNKQPFSCRGILVVYNLGLTLLSLYMFCEVSQR

SEQ ID NO: 1146 - DNA, 2714 bp, Homo sapiens
ctctgcgccgggggagctagagtgtgtgttgtcttgcgagttgtaaggaaaagtgcctttttactgtttccacgccggttttcaaatggaacattttgatgcatcacttagtacctatttcaaggcattgctaggccctcgagatactagagtaaaaggatggtttcttctggacaattatatacccacatttatctgctctgtcatatatttactaattgtatggctgggaccaaaatacatgaggaataaacagccattctcttgccgggggattttagtggtgtataaccttggactcacactgctgtctctgtatatgttctgtgagttagtaacaggagtatgggaaggcaaatacaacttcttctgtcagggcacacgcaccgcaggagaatcagatatgaagattatccgtgtcctctggtggtactacttctccaaactcatagaatttatggacactttcttcttcatcctgcgcaagaacaaccaccagatcacggtcctgcacgtctaccaccatgcctcgatgctgaacatctggtggtttgtgatgaactgggtcccctgcggccactcttattttggtgccacacttaatagcttcatccacgtcctcatgtactcttactatggtttgtcgtcagtcccttccatgcgtccatacctctggtggaagaagtacatcactcaggggcagctgcttcagtttgtgctgacaatcatccagaccagctgcggggtcatctggccgtgcacattccctcttggttggttgtatttccagattggatacatgatttccctgattgctctcttcacaaacttctacattcagacctacaacaagaaaggggcctcccgaaggaaagaccacctgaaggaccaccagaatgggtccatggctgctgtgaatggacacaccaacagcttttcacccctggaaaacaatgtgaagccaaggaagctgcggaaggattgaagtcaaagaattgaaaccctccaaaccacgtcatctgattgtaagcacaatatgagttgtgccccaatgctcgttaacagctgctgtaactagtctggcctacaatagtgtgattcatgtaggacttctttcatcaattcaaaacccctagaaaacgtatacagattatataagtagggataagatttctaacatttctgggctctctgacccctgcgctagactgtggaaagggagtattattatagtatacaacactgctgttgccttattagttataacatgataggtgctgaattgtgattcacaatttaaaaacactgtaatccaaacttttttttttaactgtagatcatgcatgtgattgtaaatgtaaatttgtacaatgttgttatggtagagaaacacacatgccttaaaatttaaaaagcagggcccaaagcttattagtttaaattagggtatgtttcaagtttgtattaatttgtaatagctctgtttagaaaaaatcaaagaccatgatttatgaaactaatgtgacataatttccagtgacttgttgatgtgaaatcagacacggcaccttcagttttgtactattggctttgaatcaagcaggctcaaatctagtggaacagtcagtttaactttttaacagatcttatttttttattttgagtgccactattaatgtaaaaaggggggggctctacagcagtcgtgatgaaacttaaatatatattctttgtcctcgagattttaggaagggtgtagggtgagtaggccatttttaatttctgaagtgctaagtgtttttatacagcaaacaaaaagtcaattttgctttccaccagtgcgagagaggatgtatacttttcaagagagatgattgcctatttaccgtttgacagagtcccgtagatgagcaatggggaactggttgccagggtctaaatttggattgatttatgcactgttatctgttttgacacagatttccttgtaaaatgtgcctagtttaccaaaattaacaaagggggggaaaggaccttagaactttttaaggtaaaatcaaatatagctacagcataagagaatcgagaaatttgatagaggtaacttgtttaatgtaaatctaatagtacttgtaatttctttctgcttagaatctaaagatgtgtttagaacctcttgtttaaaaataatagactgcttatcataaaatcacatctcacacatttgaggcagtggtcaaacaggtaaagcctatgatgtgtgtcattttaaagtgtcggaatttagcctctgaataccttctccattgggggaaagatattcttggaaccactcatgacatatcttagaaggtcattgacaatgtataaactaattgttggtttgatatttatgtaaatatcagtttaccatgctttaattttgcacattcgtactatagggagcctattggttctctattagtcttgtgggttttctgtttgaaaaggagtcatggcatctgtttacatttaccttatcaaacctagaatgtgtatatttataaatgtatgtcttcattgctaggtactaatttgcagatgtctttacatatttcaatacagaaactataacattcaatagtgtgctgtcaaagtgtgcttagctcacctggatatacctacattgttaaatgtctaaacagtaatcattaaaacatttttgattacctgtg

SEQ ID NO: 1147 - protein, 299 aa, Homo sapiens; identical to SEQ ID NO: 1133

SEQ ID NO: 1148 - DNA, 912 bp, Homo sapiens
cctagccaccggtgtctccttctacatccgcctctgcgccggctgccacccgcgctccctccgccgccgccgccttgctgctgctcaaagctgctgccgccccttgggctaaaagggatggatctgtccgcctgggtcctcccgccctgggggccggagcgcgcggcgggagagccgggggagcgctctcggagggagcgcgctttctttggagtcggcgaaacccgggtgagttcgaagagcctgtgcgagggtctgcgggcaccgggcgccgctggggggactctccggcctttcctttttgtcctgttctctccgcttccgttaaccctgcggaccttccgtccgcccctcggagggaagcctgctagctcgggaccgcttcagtttttattgaaaccagacaacggcagcccttggtactcagggagggatgaggctggttttcaaatggaacattttgatgcatcacttagtacctatttcaaggcattgctaggccctcgaggtatcagcagctctgtcctcagaatgggtcccccacttcacacagttgtaggatggctacagcagctccaagcagcacattcagaggaagaagaaaaaatgtttcatttgtgtggttttaagcataaagaagttgtttcccagagctctttgccagctgtcatccctcaaaactcactggccacaattgcttcacatgcccctgcctgaaccagccaccagagggggttaggaccaccacagattgactagatcctaaggattctctacctggggctggagttcgggtcaggtgcccgggaagcactgtgcggtgtgggaggatgaatatgtgccaatttggaaagatgagtatttgtgggaaaatgaataaagcaaagtgtaaatcagaggtttaagttaaaa

SEQ ID NO: 1149 - protein, 199 aa, Homo sapiens
MDLSAWVLPPWGPERAAGEPGERSRRERAFFGVGETRVSSKSLCEGLRAPGAAGGTLRPFLFVLFSPLPLTLRTFRPPLGGKPASSGPLQFLLKPDNGSPWYSGRDEAGFQMEHFDASLSTYFKALLGPRGISSSVLRMGPPLHTVVGWLQQLQAAHSEEEEKMFHLCGFKHKEVVSQSSLPAVIPQNSLATIASHAPA

SEQ ID NO: 1150 - DNA, 42018 bp, Mus musculus
  misc_feature (1)...(42018): n = A,T,C or G
atggcagtctttgctgaactggcccattgtttgtttttaggattgtgggcttgccccaagcactctaggcttttaggcagtgctgtataacatgagagcctttttttacctgttaaaggtgtgacaaacattccaccagagcaggtgtcaatagagacatgtaaatattgatttctcccaaaggaggaaatatgtgtgacatctatttgtcagacctgtaatggcctgacgccacgggggtttacccctacatgaggagtaggtaaaatttgataatctaaaggcattattaagtaattagaatcatttccagtagaaccaatctctctggcagttcgaggaataccagaggaaggaaaacagccatgtaggcttggcaaaattattagttgagctattttgtccccttgtgatatagaaaagacaacttgaggacaagaacagagaacctgaagtttccctttataatcttgatctacaactccagggtggacaataagaccttgtaggctgcaagagcctgcctcgtatatctctaattgaacgacagtccttagcccaatgatatccttttttacatttagtacagtcctggtgttgtcttttttataggggctctgtagtctttttttaaatgtcttggtttgccacaattaaagcaaagtttgagctcagttgaatctgagcgcctctttccctgtagaatggctgttgtcaatctagtattagtaagcggccctctaagcttacggcaaacctttaactagtcctgtaaccccttactctttctaggtgtaattgctgatctgtattcctgtgtagcttgttcataaaccaattgtttaattaaaggcatagctgtttctggatcaccaaatatcctccctgctgcctccgtcattttggccataaagtctgagaaggactcttggggtctctgtatgatctttgttagttgtttaatggcttcacctgtttgggagagcgccttttaggccttaatagccgtggaggaaatttgggcacaagctccccagtgataatttgtttgatcagtggtataagctccctgaccccttaacaggtcaaaagtccaatctctctgttctggagtcaaagcagcagtgtttgctcaggcctgcgattgtgcagcctcttgtcatagagctctctattttatatatttgtccatactggggagagcggcttttgtaatcatttgccagtcggcaggagttagtgccatgccggcaagcctgtctaactgcaccaaggtaaaattagcattggctccatatttgcggaccgactctgtcaatttcttgagttgattatattctacgggagcatgaatacgctcaccctcggctcttttaaagaccggaaatgtctgttgtattttcttttgtttctcttttggaatgaatgaatctgaatggtatctctgtacataagattttgaatggtacctctgcacatagggctgaggtgcactaggaccctgaagccgacagtccggaggccaagtagcaagctggctttcgccactttttgtctttttttggactgagtagctcgctttttatcttgctggtacctttttcccttataacgaactgctctttttacaagtccgtttcttcagaggagctaagtccttcatctgattttgagttactaagagctagctgtttaaactcatctagtggtgggtataagttctttctcctagaaacctccgttgattgatcttttttcttttctttttccttctcctttcttttaatctctcttcaggtattcttccctgacattaactttttttcgggttcaagacctgtggaaatgcttaattggtgcaccatgttttttctttgttcctactctccctctctctccgctttacctctgagagactgtcttgaattttgtccagaattttccgccctaccttaaccactttttgacatgtgaaaaggaacaaaagggcttttaacactagagaaagttcaaggccagacatacctcgtaaaaccgtaatgtgtctcgcagttctggttttgcctcgcgaacgagggatctccctcgtgccagtgtgatggtagttcccgggtttcggcaccacttatcccgagcttttgtccccaccggcaagaacacgctcaggacaaccggaatcttctgcagcaaaagctttattgtttacttctttaggagcaagaggagaagaagagcgaatggcaaaaccctgtcccttttatggaggattgtcctccgcctcggacgtgtcgctctctgattggctgcagcccatcgactgagctgtcgtcacggggaaggcagagcacatggagtggaaaactaccctggcacatgcacagattatttgtttactacttagaacacaggatgtcggcaccatcttgtaatgacgaatgtgagggcggctcctcacagagaagcatctgaaaaattgttcaacatccttaatcatcagggaaatgcaaatcaaaacaaccttggtgggattgcaagctggtacaaccactctggaaaatcaatctggcagttcctcaaaaaattggacatagtactaccggaggatccagcaatacctcccctgagcatatacccagaagatgttccaacttgtaataaggacacatgctccactatgttcatagcagccttatttatagtagccagaagctggaaagaatctagatgcccctcaagagaggaatggatacagaaaatgtggtacatttacacaatggagtactactcagcaatttaaaaacaatgaatttatgaaattcttaggcaaatggatggatctagaggatatcatcctgagtgaggtaacccaatcacaagagaacacacatgataatacactcactgataagcggatattaacctagaaacatatacaaccaccaaaaccatatactattgcatatgccagaaagattttgccaacaggaccttgatatagctatctcttttgaggctatgccagtgccggcaaatacagatgtggatactcacagtcatctattggatggaacacagggtccctaatgggagagaaagtacccaagaagctgaaggggtctataaccctataggaggatcaacaatatgaactaaccagtaccccccagagctgtgtctctaattgcatatgtagcagaggatagcctagttggccatcaatgggaggagaggcccttggtcttgcaaagatcatatgccccagtacaggggaatgccagggccaggaagcaggagtgggtgggttggggagcagtggggagggtataggggactttgggatagcatttgaaatgtaaatgaagaaattatctaataaagaaaagaaagaagccgggcgggtgtggtggcacacacgcctttaatcccagcacttgggaggcagaggcaggcaaatttctgagtttgaggctagcctggtctacaaagtgagtttcaggagagccagggctatacagagaaaccctgtctcgaaaaaacaaaaaaaaaaaaacaaaaaaaaaaacaaaaaaaaaaaagcaaaaaaaaaagaaggaaaggaaaggaaaggaaaggaaaggaaaggaaaggaaaggaagagaaagaaagagaaaggaaggaagaaaagaaggaagaaaggaagaaagaaaatgcccgggagagttctcctttctcaaggacctggaggcaaactagcttctgagtcactacgactgttgagagaactcaatgctgtgttgttataggactcagactccttagctggagtcaagcaaggcccttccagcccaaagagtccacctgttttccttggcttgtgccttctgattcttgggattctaagctctctggctcacttcctgcatcaccccttcctgagtctgtagctgttgtttgtttttctctttttagataaggtctattgtagcctagcctggcctctcactgtaactctctagtatgcctttgtccttttgattcccctgcctgagtgccgaaatgataagcacatactactgtgctacatgtcatatgctgctagggattttgttgttttgcttttttttttttcaagacagtgtttctccctatagccctggctttcttggcacttgatctgtagaccaggctggcctgaagctcaggcactctgcctcctggagtgctgagattaaaggcaggcgttcccacccacccggcagctaaaactagagaccaaacccagggtttcctgcatgctaagcaaatacactaacaactgatttatagccccagtctttcctctttgcccaattttccctcctcttctgatttcctctgacctcattttctccctcacctctgttcctcctattgtaacagggtctcagaccctcagacggcccaggtcttagcacaactgactccaattatgaaaataccactcaggccacaaaacttattgaggagagagcaccacctgctaaatgaaaacaaagacttaatccatcaaagcccatagttctgggaaagtctctaaatgtactaaccttgcttttggcttctgtggttctgcttctggctaactgtgcttgttaactgaattctgtcaacaagaatatgggttttgtgcttaaaagctcaccctgaaataatctctggccagctaataaaaactttctattggcttaaatccatgtagagcaagcagtcttctctagtggataccctataacattctgcctttgagggtcctgtgattgattgcaaggctcccaaaatgatcatgttttaaggtcaattagcttggggtcaatttcagacgtaaagtccctttccggcagtactcagataacctgaagaaagggacctgccaccagcaccagccttcaatatcttcactgcagatgcgaagaagtcaagatcctcacaggtgcacaggcagatgccagctgacttcagtagggcaaacaaattcaccatcaaagcaggttccaagaaacacaagttgtgggagtggccaaccgatgactggtccagcttgagacccataccaggagagggagcccactcctgacacttcctggaagaccaggaaccggaggctggatagcccagagtcccacaacagaaccaaacacaattctcaaaaagaaagaaagacagaaagaaagacagacagacagacagaaagaaggaaagagagaaagaaagagaagagaaaagaaagagaagagaaagagaaaagagaaaagagaaaagagaaaagagaaaagagaaaagagaaaagagaaaagagaaaagagaaaagagaaaagagaaaagagaaaagagaaaagagaaaagagaaaagagaaaagagaaaagagaaaagagaaaagagaagaaaagaaaagaaaagaaaagaagaaagtcaatgaaatgattcctaataatactaagctatactagtagacccaagcctagcataattgccatcagagaggattcatccagcaactgttgggagcagatgtagacccacagccaaacacactcaggaaatcctgcagaagagggaaagaaaggattgtaggtaccagagtggtcaaggacactacaaatcacagacccaactaaccagggttcataggagcttataaaaacagaactgatatcagggagtctgcatgggtctgacctaggtcctctaaatatatgttcccatgtatagcttggtcttctgatggaattcctacaagtgggagtaggggtgactgtccttgactcttttgacagcttttggaacccttcttctcctactggcttgactcagctggttttaatatgaggggatgtacctagtcttattgcaacttggtatgccatatttatttgatatccctggaaggcctgcctttttctgatgggaaatagaggaagagtgggtctaagagagtggggaagtgaggggggtctggaagaacagtggggaggggaaacttcgatcgggatgtaatatctgcgagaataaaaagtaaaatagaatagaaatcaggtgccacaagcttggaacacagactgcatctggactttgaagaagcccacatgtggccatgctcagggctcccctaccacatttttcttgtgaatatatttaaccctgctgggagacaaggtcacttaacccattttgcagatgaggaaactgtaggcctctaagggcaaaccatttgttcaggtgacaggtgggatttgtggtaactctagaatgacacattggtacccaagagaccaggtgggaacccctccacttctcactaacccagtagcctctgccctctggatgatctacaattgctaagccatgggaccagtcctggaccaattcaatatgcagggaccttaaaacctaccgctctccagaagaccagagtgacagaatggggaggcagtctccacaccaggcagagtaggacatctgtaatagaggatgtcttcatcagaccaggaacttacagtccacatagcaactgtgcaggctcacttcagagatgctgtcctctcttccgaaagagcatctgcttcttcttctgatacaagtgcaagtgcaggagttggagaggtggctcagagtatccatcagtaagatacttgtccaccaagcatgaggaccagacttcaaatccccagaacccactaaaacacaaacaggtttggtgccttctgcttactcgcaacattccagaggcaggaacaggagcacgaccacagcaagtcgactggctaggatagctagaatctgctcagtaaataaagcaaacgatcaagaaagacacccagaggcaacttgggtcctcaacatgcatgtgcacactcacttgcatgaaacacctgcacatacgcatgaccacaattgaaagtgcatgcatgcatgtgtttgtccaaaaaacaaaacaaaaaaaaagcataataaataaaacgcaaatgctcctcagcttctgtagttgaaaacaatataaatcaagagtacgttttactatatatccaatttatcaaacgtcacggctttgcccagcttactgaaaatgtgttcaaaagccaaccttcgccaacagttgggctagaccatttgtcaaataaaacccattacataataaagaccaaagaccaaaacagctcaagccatttgcctcacagagtttgcttcagaatgccagctgcttcccctcagaagctctgctgactggagccgcaggtcactgaagctgccatcctggaaagagctcaaaactcaaaattgaaatgttagacctagtggggaaacccccacccaattcccgattcggcgtgcacccaaaaaatcacgaaggaccatctcttgatgtaattacatgaggacgtttaattacggagctccggacctgttgtgtccggccagcagatcacagcctgggttctagcctggaaagacattttggaaacctggaagagaagaggggctgggctgcgcgagataaggaaggaaccaagacaaaggtctctgctcaaggttcaatttttactattccggcactcagttatgaaggaagtgggaggggcctaattcccaccaattaatcttggagtccaatagcagggtgaccacgtgtatggctccaaacagcaaagcagcaggttccagcagtgggcgtggcagaacgattgagccggcaagctccatccaggtgtaaactgtggaaccattaaggctgggggaggggaggctacacggaccgacatgcatcccacacaggagataaaggatgttggccagaggctcgaaagctaggggtcaggccgggcgtggtggctcatgcctttactcacagcacttgggaggcagaggcaggcagatttctgagttcgaggccagcctggtctacagagtgagttccaggacagccagggctatacagagaaaccctgtctcgaaaccccccccccaaaaaaagaggaaagctagggatttttatggggtaaggggcttaggggtgtggaattcagcatagtgacacactattggcttatttaaacattaacagaaagattacatgttagcaaaagggcatcagaaaaaaacaaaaaaacaaacaaaaaaatggtggcgcacgcctttactcccagcacttgggaggcagaggcaggtggatttctgagtttgaggccagcctggtctacaaagtgagttccaggacagccagggctatacagagaaaccctgtctcaaaaaaccaaaaccaaaaaaaaaaaaaaaaaaaaaaagggcatcagaactttgttcctgtgggctgggggcttatcttgctcacatagcaaccagttgatgtatgactttacctggcgtcaaggggcagtagacagaggggaggttccggccaggtggtgttgacccagacaagatagccctgcttgtacaatcaagctgttcttaggactgtcttaacaacagccctgtctgttctgctttgttctcggccccaggcctagactcatagacaactcttttacatgaattacaagatacaaaatctcattttctttcagaaacacattgtcttagtcagggtttctattcctgcacaaacatcatgaccaagaagcaagttggggaggaaagggtttattcggcttacacttccatactgctattcatcaccaaggaagtcaggactggaactcaagcaggtcaggaagcaggagctgatgcagaggccatggagggatgttccttactggcttgcttcccctggcttgctcagcctgctctcttatagaaccaagactaccagcccagagatggttccacccacaaggggcctttcccccttgatcactaattgagaaaatgccttacagctggatctcatggaggcatttcctcaattgaagcttctttctctgtgataactccagctgtgtcaagttgacacacaaaaccagccagtacacacatcaagtcagatatcctaaaatgggagccctttgcacactatctgtccttggagccatactccaggcctgtcagaaccgatcagtgtagattcagtgtccacatgtccagagtatctgaaagacgtgcctttgtgtggtggcttttggttcggtttgtctatttggctatttggggggggggggggagtgtgtgtgtgtgtttataggagtactaggcattgaacttattcaaggcttatatgagagccttgtgcatgatggaccatgctcgctgagttacatccgtagtctcagggcttcttaaatagaattctgaaaactggtcaaagccactagaccagtagtttcaacctcattttatggtgatccccaaaccattagattatttttgttgctatgtcataactgtacatttgatactattataaattataatataaatatctgtgtttttcgatggtcttaggtggccccttttaaagggtcatttgacccccaggtagagaaccaccttactatacttaattctaaaagacttctggaatctcttcccccggcactagaaagacagaatctgaccaaagaatctcaggagaggaaggtcattctgccttcatcaaaatgccatgggctgccaggagaaacttgtaaaggaggctgaaacaggagggttacaagttcaaagacagcctgggctatatggggactgtaagaagaaaaaaagagccaggtgtggtggcgcacacctttaatcccagcacttgggaggcagaggcaggtggatttctgagttcaaggccagcctggtctacaaagtgagtacagagaaaccctgtctcaaaaaaccaaaaaagaagaagaaggaagaagaaggaggaaggaggaggaagcaacgcaaatgcctggaagcaacccaaatgcctgttgggggtgagcagtccagacagccctctggttaagtcatttcaagctatagggaaggccagggagctatggttcaagaaaccttcacggagacggagttaccagagatggggacagacaggaaactggggattaggctgcgcttcctcccacttggcagggactagccttcagggtcagaccctgagaacccttcttcccaagagcaggagtgtaatggccacagggggcaggagaggaaccagcatcacctaggcggaggccagagtcgccccacctcctttccacaggctgggctcagagggcactcggtgggaccgggcagtgagcgccgagatgtgggctgcgctgccgctgctgtgcgctggggcctggctgctgagtactggggccaccgccgagctgaccgtgaacgccataggtaggagggagaaagtggggcgcagggctccgagggcaccggagggagaacagggaacttcgggctagtctcgggggacacgcgtcttgcgtgatccgaggaacaggctggcaggtacctagagtccttttggctcagatctagatacagaagccttcagccccttctgccggacagctaagggcacaaaactttcctgtcccaccacgggagggagcgggacatcccagcctgtactttccgtggacttggcctccccggggatcgccctgcctgggttattagtccgactgtgccgtgctggggtgactccctgccctgctgaacatggggcacccacagaagttttaaccctagcgtctgtggtgtgcctggaaaaagctggctcgggaaagtcgcctcaactcttggcaaagtgcaaccgcaggagactaaccagtaaatattttactgtgtacaacgttggtctctgtagcaactcctaaaggctacaaacgaacctttggaacctgtggaacgaacgcagctacgggtagctggttctaatagatgtttatttatggacagtgaaaacagaagttaaagcgcgccagccatttttaagtgtaaagagccagtcaatcaaagcccctggctgagagtagatggtggtctgggatttcctagccctgctgatggtccttccgcaggacacacaaaacttcctttttttaaaaaaaaaaaaaaagattttattagcatatattaattgtacttaataataagtttcattattacattttcatgagtgtttataatatatcctgatatatttcagccttcattaccctctattgttccccctcccatttctactttctcttaccagcttgtctttctttctttttggttttgtaactcactggaactagggctttcagagagagagataaatgccacgtagcaaattcatattgctgtgctgacttgggtctctggggatctcccgggcagtgtgaagacatcccaaacgatccggactcagactgtatcagcgaaatcagtctagaaacttagtctctctctcattttctctctctctctctctctctctctctctctctctctctctctttctctctctctcttctctcctctttttctctttctctctctttctctctctccccctccccatccccttttctcctcattcctccctccctcgtatctttctgtgaccctctgggctttattagggttatcaaaaacatggtcaccttaccttaccagccactacaccactgaagaaaatgtatctttccttccgcggccaatcccccacccccacaactattaactaacctataaatcctcaggcagagatgggaccctgagagcccctccagcctttttgggtttctgtttttaattcatttactagccaaggatgaccttgaactcctgatcttcttgtctatcctccaactactgagattccaggcatgtgtcaagccctatgtaaaaacattcattttaaagagatagctcagtctgtaaagcccttagtataaaggtctgagagccagagtcatcccccaaactgtgtaaaagctggtcagacatagcagctacctgtaatcactgtattcaggaggcaacaatggaagggttttggggtaaacaagctacctagactacctagaatcggtgagctctgggttcaattaaagaccccttcctcagtaaagtggagtgcaagaaaggaaaacttgggacatctctgtgagtatacagtgcaccatacactgtgcgcgcgcgcgcacacacacacacacacacacacacacacacactgtgcacacacatgtaaaaaaataaattgatgaaatgaatttcatttaaatcagagtaaacttgggatgggtctgaggtcctctgtgctttcatccaccaacactgaagaattctgtggctttcttcctcttgttggtttggaaaccaccaccaccaccaccacctgcaagaggcacaagttagctataaatcctgcctgctgagaaacctggtcctcagctgagatttgtcttctctgaaggcctcagccacacagcaggcccttaacctgggtttggaatcccctgcacccccctcagaccttgtcttaaggaaatatgctcctctccctgcccctcccccttatggtcctgacttagtttctggagcaagtctggagcttttagatagagatgtagctgtcacatagcaatgaccttcatattgctgcgttggcacagacccctaggaatcccctgggccaacatggaaccatcccaaatgatctggacgcagatggtgccagtgaaaccagactagaccctttacttccaaactagccatctgaccagattacagatgcctgcaattcagcactcaaagggctaaagcataaagattgtgaattcaaggctagcctgggctagttagccagatgctgttctaaacacacattcagaagatacatttccacccaagttttacttctgtaggtttaacaatgacttttcatagagtaaaatgtatttggggaaaaaaatcaaggtcttcataataattttgactattgcttaatctagaataattttataatgattaggaagcaaagatgattttaattgaacttttgtgttgcagaaaaggagatagggtaatttaatataagtattctttcttaggctaaacttgtgtgagacagaaaggcaggtgttcaaggagaagaaaatatataaaatattcaactcttttttttaatttattttttttattacatattttcctcaattacatttccaatgctatcccaaaagtcccccataccctcccccccacttccctacccactcattcccattttttttggccctggcgttcccctgtactggggcatatacagtttgcgtgtccaatgggcctctctttccagtgatggccgactaggccatcttttgatacatatgcagctagagtcaagagctccggggtactggttagttcataatgttgttccacctatagggttgcagatccctttagctccttgggtactttctctagctcctccattgggagccctgtgatccatccaatagctgactgtgagcatccacttctgtgtttgctaggccccagcatagtctcacaagagacagctacatctgggtcctttcgataaaatcttgctagtgtatgcaatggtgtcagcgtttggaagctgattatggggtggatccctggatatggcaatcactagatggtccatcctttcatctcagctccaaactttgtctctgtaactccttccatgggtattttgttcccacttctaaggaggggcatagtgtccaaacttcagtcttcattattcttgagtttcatgtgaatattcaactcttttgttgttgttattggtggtctggttttgagatggaaacttttatgtagccaagatgaccattgaattcctccagctcctccttcctctccttccacagagctagaattaacaagcttgaacctccacaaccagcaaggtatccaactcttgtgtttgtgtgtaaggcagtatatgtgtgtatgtatgttctcacatatgaactcacatgcgtatacacatgtgtgggtgcccaaggttagtgtcaggaaccttccttgattgttcttctaccttcttcatcgaggccaagtctgtcagtcaaactaatttggctagtgctgccgaatgcactctgggtatcgcctggcacggccaccccgggctggaactacaggttagcttccacattcgactggcatttaataggttctgtagatccaagctccagccctcttgctttcatggctagtgccttaactgctcagccatctccctagccatggtcttgttttcaagtcaacatttaatgtaaagcgccaacgagatggctcagaaaggaaaggtgcttgctaccaggtctaacaccttgagttcagttcccagagtccgtgtggtagagggcaagaatttgcttctggccactatagtcacaccatggtgtgttcaggtacaacatatgtacacattgtaaaaaataaaaataaaaatttaaaacataacagtaggagagatggctcagcagttaggagcactgactgctcttccagaggtcctgagttcaattcctagcaatggctcacaaccatcggatgccttcttctggtgtgtctgaagacagctacagtgtactcatataaataaaataaataaataaatctttaaaacacacacacacataatacattggaacacatcttttgcaggtacttaaatttaaaaatggaaattttaaattgtgtccaaggaaggatatagctagaatccacaaacacctggtttgcttgcttttgtaaagttttataggagacacatccatacccatttcttttcccattacctgtggctccatttaggcaacaaagatgagtaatggcagtaaccatagacccatttgctctcactgggcatggtggtacccgactgtaatcccaaatctcaggagaataagtatccaagtcttcaattaactgtatgttgaactgtagtggcagaagtaccctgaccattaaacatggacttcagtgaatttccgtgattgaacagagtcatgtaaattgtaccccatgaaacaataaaatatccccaatactccaaaattctatttctgactagacatgagaaaaaaaaaaaaaaaaaaaaaaaacctgttcaccctagacagagaatcagtgacaggacaaagtgaatactactaaagtccaacttgatgagccagggagttgtactgggatgacttcctggagtgtgggtaaggaattagttacaggaacggaaataacaaagctgcatcaacacaaatcctcccgagcaaggctcacagctcatgaaagctggaaatctttctcttgactgatctctgcttttccaagcacttgctaccaaacttggagacctgggttggatccttacaatccacttggtgaaaggaaagacccaactcttttttttttttttttttttttaaatgtagagtgaggttttttttcctcctttgttttttttttttttttaaagatttatttatttattatatgtaaatacactgtagctgtcttcagacacaccagaagagggagtcagatcttgttacggatggttgtgagccaccatgtggttgctgggatttgaactctggaccttcggaagaacagtcaggtgctcttacccactgagccatctcaccagccccaagacccaactcttaaaagctagcttctgacacgtacacacacacacacacacacacacacacatcaatcaatataatttcaaacttttacatataccactgatgggggtgttcagtgggtaaagtgcttatggcccaagtgtgagggcctgagttctgatccctagccccacacaaaaagtcagatgtggggcacacacctataaccccagagctgaagggaagagacagaaggatcccggggctttctagccagcccgtatagccaaatagctgagctccgggttcttccagacactctgtctcaagaaataaggtagagagagaaagaggaaggcatctagtcagctctggccttcacatgcgcacacaaggttacacacctcccccacataccacttataaacagcagtttctcaaaatctcttgtggcaataaagcagaaagagtctgagttccttttcgaactcaagctttagataacccaccccaacctccactttgctatttttgcgaatgcaaatcagctaggtgtggtggcacacacttttaattcctgccctctgaggcaaaggcaggcagatctctatgagtttgaggccagtcgagactaccgagtgagactctgtctcacaataataataatagtagtaataatgataaattaataaaatgcaaattagctctcctgtgccctactaggctgtagcctcaacaagatcacgaggcatgtgcaaacataactttttctttttttttctttacagaaaagtttcactttaagtcatggatgaaacaggtcagtgaccaacttcttcttttgaagtttctcttgtcacaaagcttccagttagcaaactgaactgaatcagatttgagacaaaagagcacttgtccaaccttgctctgtctatcccgggtctttccatgattcatactggccaaactccaggaaggagacagtgaagtgaccttccaaatagtgctgcccagtaatgagcctggcagaagccttccatgccttctcttcattactgtggcttgtcttcagagcactttgcacagtggctggagaatctattgggaaaatcagtaggtacagctttgaaaatgctgggtcagccatacacttggctcagcaatgtgtcatggtgtctgcgggctacctactcttggcaggtctcctcactgggatctcctgaacttttttttttttttttcctgagacagggtttctctgtgtagccctgacagtcctggaactcactctgtagaccaggctggcctccaactcagaaatcctcctgccttggcctcccaagtgctgggattaaaggcatgagccaccacttcctggctctcctgaactcttaactgatgtcctgacagttgtgtgggcttcattctagccacaggtcctttataacttcctgatattggcagtagagaacaagaacagagactcatctaactgtagatctgtcctgagatagtggcagaatgaaaatccccatggactggtgattcagcttagtaggtagtgtgcttgcctagcttgcgcagaactccactttgatctccagcgccatgtaatccaggcatggtgacacacgcctgtaatcccagaacttgggaggtagaggtaggataggaatcttagatgttcgtgatcattttgtctagggacatttgacatcagtctacatccatgacaccctggaggagtgctggggggatggggaagtctctaaaaagaccccctctggtaagtttcactcacctattctcaggacctgttttgttttagcatcaaaagacgtacagctcggtggagtacaaccacagactgcagatgtttgccaacaactggaggaagattcaagcccacaaccagaggaaccacacatttaaaagtactgggaagccctgattcctccaggcctctgggagaagatggggtgggaacacctcagatctggaaagaaaatgagtagtggcataggctggtaaaaaggacctgctcagggctaacaggcatagagagcagagactcagaatcagggatgtctttggggaatccgggttctgtacaggatataaatgtagatggtactggtaatcttctgcgggagtagagaagtttacaaaagactctagagaagccctgccctacccctctcatctgagggtacagcacacacaaccaagatctgtctgggttgatgtgaggccttgccgcaacctcagactgctctgagcccatgagcagtctctgccgtcatccagcttcactcctggtgagggtcactagaaacacgtctagcctgatcactgcagttgctgaggaatgatggcagcccagctaaagggactctgggctgcaagcatgaactgaaaggaaaacagaacttctgcctttttctgtctggtacttgcttataaccttggagcaagggctgacttgggttgaagtagaactggcaagtgttgaaccggctgggttgaactgaacattggatacggtacaggcatccagacacctgcacagatatggctactctttacctgggatttgtcagcctcacagtgggaatctatctacttcatccaccaggaactctgggacatgtctgtctgcccgaacttctcagaggcacagtatcagttgaacttgctatattgaatcatacaaaatatagaatttttttttttttttggtttttcgaggcagggtttctctgtatagccctggctgtcctggaactcactttgtagaccaggctggcctcgaactcagaaatccacctgcctctgcctcccgagtgctgggattaaaggcgtgtgctaccacacccagctaaaatatagaattttatagaagccaagttgtagcggctataaaaagaacatgggtgaaaagggattcttgtttgttagtgattcactatgaccctctacttcgctgcggctttgtttagtttggtttccttttttttctttttcagtggcattgaaccagttttcagatatgagctttgctgaaataaaacacaaattcctttggtcagagcctcaggttagtgtacttcattgtaaataaatctgggtcttttcactcaaacctgtgaagtaaacattaagcctggtttccagctagattcagccctctccccagccatgcctatgggtcctttgggggagcagaagtatccatcccttagcagcccctcagtccaggcctctggtcttaacaacatgaacccataatctagaaggagcagataaaatacaggtgcccacttaaaagtgaatttcagacagacttttttttttaatatccccactgcagtttcctctctgtcctctcctcccatcccccctctccccagatcccaatccactctgtttctcttcagaaaagggcaggtcttccatgaatatcaaccagccatggcatatcaagttgcagcaagactatggcctggatcttactatgtaactaaggctaaccttgaacccccaatcctcctgcctcgacttcaaaagtgctcggtggatgacaccacactcaaatttttatttctcattcccttttgtatgtgtgtatatgcatgtgtacttgaatatgtgtggtgtatgcatgtgcttggttgatgcacatgtgtatggcgtatgtgtgtgttgtgtgtgtatatgggcgtatatgcatgtgtgtgatggacacacccatgtgagggatgcctgtgtggatgtgtgtgtgagtgcactggcccacacaccgatatgtgcacatgggaggccacagttagcatgccttcagtgctctccaccttatttgtttttaagatttattttttatgtatttaggagtacatgtatatgtgtctgttcatatatgtttgtgccatatgtatgtgggtgcccatggaggccagaagacgaaggtattggagccccagaagttgaagttatagttgttagctacctaatgtgggtgggaactaaacccagatcctctggaagaacagccagtgccctcggctgctgatcgctgagccatctctccagtccctttaccatttttttcttcacacaaggtctcaagcagccctggctgacctcaaaccctgtgtaaaccaggctggccttagacccatctacctctgcctcctgagtgctaggattagaggtgtgtgccacaaccacccaacttccacccctacctggagcccacctgttcagctagatccaagtccccaggatctgcctgtctcctgccccacccccaacactagggtcacaaagtcacatagctgtggggacccaggtcctcatctagggccaacaaacactttgcccactgaactgcctaccccagacctttcattccttttcaatgattacatttcccttgaaaagtacgtatttggttgtttcagaattgctcagccaccaaaagtaactacctccgaggtacaggcccctacccttcctccatggactggaggaagaaaggaaatgttgtttcgccagtgaaaaatcaggtacgcacggcagtccccacattttccctccaaacgagccatgctgtcaaacttcgtactaggatggagaacgcagatgctcacagcacctctgcaagcatcccctgatgctgcctcatccttcatctctctagttctctcttctgcaaggcttgggttgtcattgctctgtggttcccatactggtgggtggagccatgtcctgagggcacattcattgactccctctactctgtgtgttctctctagggggcctgtggcagctgctggactttctctaccacgggggccctagagtcagctgtggctattgccagtgggaaaatgctgtctttggtaagaagtcagccttatgccatcccttaaagaacagaccacctctcagcactaggcgtgggccttcaggctccttcatggtgtcagctaagagtttgatttccattggatctcatggttccaaccttgatggcatttagcctgagaagctcagctaatgtcttcccaaaaaagaatgggagtgaggaaaggccccaagggcttcttcctgagtcaatgtgggtgtccacattcctcagtttttcagcctggtactttaccaataagagctctggacagcactgcctaggagatacccattctaggagctgggccctttcccatgcgttgttatcttcatgcaggggagagctagggcctatctgtctacccactaacccccaagggaagggtcttataagtgacagaattgtcccacagtatagggaagagagaagtcaggagtgatggggcagtggctctggacctgacacctctccctctagcacagttccttgagatgcccagtgcatactgtgtatacctctacaggaggtgctcatgagggaggaggacctatttgtgtcctcacacctgcttggcagccaggtcattttgagtacacacgcccctcccacctccagcatgtaccagctgcagggcagacactctgggatattcagagatcatacaggatcgtcaccacacaaaactaattaggccacaaatgtaaatgggctagtgaatgctgacgcttcacagcagcacctcacgggcctcccagccatctcctcacagggtctgtgcttcctcctctaggctgagcagcagctggtggattgtgcccaagccttcaacaatcatggctgcaaagggtatgttcgggagtgggagtgctccccacttctcatctccctcatttgctgctgtttgatttagtagtagctagagtcatgaaatcccattcacccccatgggtagagaattgaaggatctcacagctgaaggtttagggctaagagtccagtctccttccaagatgtcacccagccccatgattagcatgatcagcctcaccagtcaccaaagcttcaggacaagtggccaaaagaatcaatagaggaagaaacacactaccctccaaactccagattcacacatggatgggtccttagacacattccctgaagcacagatgccccagtctcgagagctctgagagctttggaaatgtgtccattgcttctcggccttttggctaagatcaagtgtggaaatgtgtccatccataaagctgtactgtgccagcttcctggtcatcctcttagtaagttactaggaagtagctcccattttcacagtgacacttacccacctctctttgtccatgtgagctgttctctgcgagtttgggtggttagactggtttctgggcatataatatgcagagtgtcccctagggtcctcgagggcatagtctcatccttgacttcccatcagacccatgtgccttcactgctcctcaggggacatctcatgtgccatcttctctgacagcagtgactagcagggtctcttgcagaaagccctgtcctagcccgagtccagggatccatccagagctgatgctacagcctgccgggtactaactttcccctcgctttttatctttcttctgtccatcttcaacctgcctgtgcacggcaagaggctgactcctggccacgctggagtcctatcatcttttgaagtctgtttgcttcagttcctgaatactgccattttcttttcaagttccagttcccaccataggcccctttgggcctaggtacaggtgaccacccaagagacaatagaacacacaatgtagacattcctcagagttgtagaagccatgcacgagcatgtcataggtcaggtgtcaacatgggctatagggaaaagagcaaaggcgtcacaaaaccgcatctgctgagtgatttattggttgatcggttagctcattggtttgttgatgggaggtagtaagataggaaagactggcctttagaatctttaaagtctgaatccagactgtggcccaggcatggtagtagctaccacctggggctgacatgaaggatcaggcaggctgtctgtggaacaccagccatgaggaagcctggaacggaagccattgtggtgatggtgattccatctgcctcccgaggggctgcctgcttctcctgacaggggcctctgtcccagaggggccctcgtgtctcactcagactccagtggctgagaccagggatgcatggctgatctctcagaaacctctgccactagaatgtgccctaccaaaatcccagtgatctgggcaagggcaaaaatcaccaagcctcagccccaatgcccagtcctgtctgtgaggcaagacctggaagagcttatgagtgtgtccttctttcagaggtctccccagccaggccttcgagtacatcctatacaacaagggcatcatggaagaagacagctacccttacataggcaaggtaactgtgggtggcctcagctgtgtctcctctcagtttcacccttatcctcctccatcctgctgccattcaaattgggagcctttgtggaactctgctcttaccagggaactcttgtcaactgctcctgtagccatcaactctcttttatgaatgcccttcttcaggaccctcccccctcaactcatattggcttattcctttgtggttccactggtccactctgtgtccacctccatccagaatttggcctcctcatcaggaaatacctatctgccctcgccctgggcctctctgaccagctcaacctacatacctaccttggtcacaggccaagtctttcccacgattaggcctatcaattaccagctcccacaaaccacatccctttcccccagtttctgtctgatgacctaatctctgcctgcctctggtcagcactgttccctggactgttcctccaatcctgctagattaggtccaactcaacttctctttcttgatttccttgggctgctgagtcaggtccttccttgggctctgactaagtctctcctgctcctttaaggaccaggatatttctaagtccctctggagtgccactgtccctgtggtgcatgcaagctgcttagaaaaggttttcaatgttcacagggagaatgtgacctcagctgaaggctaaacatctctctttttttgtttgtttgtttgtttttaattaattaatttctttttacaccccatagtttattccccccaccgaccaccctgtgactgttccacatcccatacctgctccccaccccccacccccaccccacctgacctctaacctccctggggcctccagtctcttaaggattaggtgcatcatctctgaataaattcagacccggcaggaaatcctctactgtatgtatgttgggggcctcatatcagacggtgtatgctgcctgttcagtggtcctgtgtttgagaaatcttgggggtccagattaattgggactgctggtcctcctacagggtcgcctttctcctcagcttctttcagccttccctaattcagcaacaggagtcagctgcttctgtccattgcttggatgcaaatatatgcacctgactcttttagctggttgttggatcttccagagtgtggtcatgctgggtccctttttctgagcactccttagcctcagtaatagtgtcaggccttgggacctccccttgagctggatcccacgttggaaggttaagcatctctaatctgtattctcttccctatttcaccccgaacaggatagttcatgcagattcaacccccaaaaagctgttgcattcgtcaagaatgttgtcaacatcacactcgtgagtactgcgtccagctctagctagggagtgtgttctgctatggaggccagaagagcagctcttttgggaagcttgtcacagatggaggaatctgggttattgctgacccctgctcaccatataaaggctatgtggtgaaagacaggaaggaatcatggggtgacagggggtgcactgggttctgggttacaggtctatgggggactttgtgcctgtgggtctgttttcttgtctaaaatgcaataatccccaccatccctctagcatagtagttctcaacctccctaatgctgccacctttttttaatacggttcctcctgttgtgatgacctccaaccttaaagttagtcattgctacttcataactgtaattttgctactggtatgagtcataaggtaatatctgatatgtgacccctgtgaactgatcagtcgttcaacagcaccccgtaaaggagtcgtgagccacaggttgagaaccactgcactcgtggctggcccaggcaagtctgcacatggggaggtgaggggcatgcgcttgtcagtcaggccagactaagatctgctgcagccccagccttcctcaagtctgaaaggcacagtattgttcccacccctgtcacctgcctgtggcttaggtaggggctgtgtgtatcctgtgttgctggtctccctttcagcccccaggctgagggaaagagagtaacccatcattgctctaataaggtctgccacacctcacctggagctttcccgtaagatagtaacagatgcctgctcacaccagctagggtacccacaacagaccaaaatgatcacagtgcacccaagtctagcttggtgagcctgtgaatttgttgggcttacttacaggaatgtgaataacctcaaatcggctgtgtcatcaaaatgtcccatgttagagatgataataactccatatagctgcatagatagcacatgctacctcctatgtacactagaacctgcagagaccacatgaagctgggacagtttatatagccttgacagagactcggcaggtgggggggagatatctgcaaccacgggggagagtctcatgaacctcccttccccctcctatgagggaacaccagcaagtcaaatcttactgagtctgatcagggccactctaagatggtaatgtctgttatacttgaagggcagcattcctgaacacgcagtcacaccctgcttttccaagagaacgtgtgagcatgcatgagtggcctcgtgagtctgggaggcatgggctcagtcagggaggagtgtgtatgatgtgagaaacctccatgacgtgtgcagatgtgatatgcaggtaagggggcgtgtggcacaaacatgaactttctgtaatgacagcagctaccatccaaagaaagggcatgccaagctccccatagcaataacagtttggagtgattagggcagtataaagccacccgatgggcctcatttccaaataacctatgacaggaatgtggttattaactccatttgacagatgagacaactaagtctcagaggagctttaaaaatgtgcccaggagctgagaggtgaggctggatttgactgaggaatgtcactccagaactggcgttaaccacctcagcaatacagctcacttcctgcaatagagatattatcgtctcctagaaagaaacctgttttttttgttgttgttgttttgtttttttaacacacccaccaagactggccctctgggccactggactccaccaggaagtgaaagaagcactcaaaagttaccttttgtctggttcccaggaagacacgtcaggagcacaagcagagccccagagagcaggccagaactctcagacaggacaagggagagcgttgaaacagtgccagccaccgaggttcttgccctaacgcggcaggcctctgtgatctcctgtgctcccaagaagtctagccatacttggaaggaacccattgcctgagcgaggacacaccgagttctgcactctgtctccttctgtgctttgcttcccttctctgagccctggcctcaactcactgaatctcctgcatcatttccactcctaagcatctcattactgtggctccctctcagttttgttcccaactgggttgctgtaaaacacagagtaggggaaccacctttgccctggagggagactttggaggtctaccaagtgcttctggctgctgctgtccccctgcctccaaaaagttcccatgactcccttcttgctttcccccaccaacatggcaggtcctgctcagaaggctcaaggccttgactggtcttgtttccaccccggtatagttattgcctatccttggatctgtaagatctctgttccacccatgaggttccctagattgtcttcctggatgtggagctgaagcgagagcgtcacactcatctctgcatctttcgtaggatggcctcagtggtcagttgtgactgagagaatgaacggctgaactgtgtgtgaggttgtcagggagacaagtgagagatttccagacgctcagaaagggagggcaaaggccaaagccacaagggagctagtctggtttgggaggaagaactataagccagattaaaatctaaatgaggtgtatcttagtcatagaacacttgtttagcacgcatgagatttaaccttaggtttgatccaccaccaccaccacaacaacaaagacacggcatagtgacatacataagtgtagaacactcgcctaacgtgctccgtccccatcaatctgtttagttttactttttgttttgagacagtctgttatatagctctgggtgttctaaaacccaatatgtagaccagaatggtcttgaactcagaggcccacttgcttctgcctcccaggtgctaaggactaaaggtgtgtgccatcatgccctgttttaaaaggtttctaaaagataaaattcatccaagccaggcatggtagttcaagcctgtaatcccagcacttgagagatgaaggcaggaagattgtccaagatcatcctcagcttcagggccacaagtatggccctcagcttgaggtaacaagtttgagcccagcctggaccacttatgaccctatctcaaaaaataacaaaattcaatccaaagggtgcttgctgacaccctgcataagaaggtggagtctgcattattgctcaatgtcaggggttgttgtccctcaaggttacctgcacagctctggaactccagcccctaccttcagacaacaggccataaacatggaggggaggtgggagatgccctgcatgtctgtcagcccttctgtctgtccacagaatgacgaggctgcaatggttgaggctgtggctctatacaaccctgtgagcttcgcctttgaggtgactgaagattttttgatgtataaaagtggcgtctactccaggtaagctgagggggcaggggggggaggggaatcagagggagactggagaagactggatggacctcctcaaacccagcgcacggtctctgcctcaacctagactcctaattagatacttgtgagacttagcgtacctctctttgtctccttcagctctgagtgtcagggaccaagtctctaacccagcaaagaaaagagaggtagtgaaggatgccacaggcccagccacgatggctaagtcatgactaaggccaaaatccatgcccagagctctatggtcatctacagaagtgctacatccagccaaatatttgaagatggggttggagatgtacctcacttggtgagggcttgcctagcaggcagcacagcctggggtgggtccctagcaacacataaatggggtgtgatggtccatacctaaaatccaagcactgaggaggaggaagcaggagaatcagactctcaggtcatccttcgctacgtgtagagctaaggctagtcttgtcagcatgagaccctgtctcacacacacacaaaaaaaggatcaaaaatgggaaaggaaaaatagctgttttcagacatcagaattctatgctagagagttcactatctggttcttcaggaagaccgtagagagagagagagaccttatcacccagagcctcatggttagtagacagtcgctctattgatgagctgcaccgtgtcccctccccccgtggcatgtctagtatgggatttctacagtccctaggctgcccattgggctacaggaacacattcagcaaagagtctatctagttactccccctgctctccaggctcctccatcttctctgttttccagctacccctagaatgtccatgttcttctgggctttgccctcagccctctatacaaccataaatccactgccagctatttgataggaacatccatggcccaccaagtcccttccaagtattatacctatgcttagatctgagtgttattagaccctgccaattcggccatggagacctccaaccctgcatttgcctgacccagggctccttgaaggcatctatgtctgttagcagacccacatccctgatgctgtgcgagaggccagagccacaacaggctgctcactctcctctcctctctattccataccatcccatctttagatgcttcctcactggcttgttcctaacatctgtctctcctacaatagacatccaggcctctcctccatttggacccagaatccttctgaagtgcttttctgtctatgaaaatttctgtgtaagaggatatatatatatatatatatatatatatatatatatatatatataaatgtgtatatgtatatatatgtatatatatatattcatgtctgtccaagtatgcatgtatatacatgtgaaggccagaagtcaacataactatgttggtgcacatgcacttgtgtgtgtatgtagtgtatgtatgtggaggtcagaagtcaatctaacgtgttttccctgatgactttcttagtttttgagacagggtctctcactagccctggttaatgctcaatagtttagctggtctggcaggtaaatgtgctccaggaatttgtctgtcaccacgtccccagcactgggattccaaaagtaagctggctgttacacatgttcccatgtatgctgggaatctgaactcagatgctcaagactcgtgtggaaaacacctttcctccctgagccatctccctagccctatgatgctttgggtataaatagccaaggcctccctccccattacccagggttcttggtgattttgctcccctcttcctctgcacacatctgtcaacaaacctcccttcttgtctctcctacaaagctcattctgcccctattccctcatgtgagccatgaggaagggcttatagtttcatatataacccctgctcctcaaggaatcttcacttcccaccctactggtttaggtcccactccttggggcccctatcccctacttaactggcacatcccgcagtccattacagagcagcttcctctgccaactgccccctaccaaacaaagctttctaagagcagagagggtcctactgtccgtcgttcagcaccttgccctgaatgtgacacattctgatgacagttcaaagtccacttaatttctgtatgcccttgggaattgatttcttcctttcctttcctttcctttttcctttcctttcctttcctttcctttcctttcctttcctttcctttcctttcctttcctttccttcccttcccttcccttcccttcccttcccttcccttcccttcccttccctttcctttcctttcctttcctttttcttttcttttttgagacagggtttctctctgtagcccaggctggtctcaaactcacagagtttgcctgcctgcctctgtctccagagtactagggttaaagacttatgcccccacaccctttctttccatgcccattgaatcaacatgtggccactgcagtttgtcttctcgaagtcccagagtttttcagaggctaaagggcaagcctacatatttgccctaagtacaaggtcatttttcgaaggaacgcagaagcagcagagcagtggctggactccagtccagtactgcagcctatagaagtgcagcagggactcctccccttgccgggaatcagaagtgttcacatggagtgggatcgtgtggagactactgaagcagaagggctgagaactgatgagacttgttgactccatcatggctgagccgtagctaattgagacccaacacaccagcctgcctccagtgggaatcatttctacagcactaaagagcccttgtttgtgacagtccttgcctttatccgccctatactccaagcctttataaatttcattttcttttccagtaaatcctgtcataaaactccagataaagtaaaccatgcagtcctggcggttggctatggagaacagaatggattactctactggattgtgaaaaactcttggggctcccagtggggggagaatgggtaagcccttgttgctgatgtctgaggcgtccggtggtaggaggcatcactacttcaaagttaaagagtcttcgggagttggacagcaagctctaccaggccagggaaaggagaacatgagaatggaaccttcacatgccaaggtcctgttagcaagaccctccccatcataggatcccaggtcccaacaagtctgcaaaggacaggacactaatcagctaatgaggtctgtaactgaaggttacaggcagacctcaacgtcttgctgggacaaaaccaacctctggaagggtctgagaaatgaaatcagtgaattcgttacagtgagtgacagcccccacccccaccccctttgaatcaggatgaagagacagacacacacacacaactgagaaggagagtttttgtttttaggaagccatactggctgttagatagctatatgaggacccagacagcagcaagaagggaacctccatcaattccggggagaagtaggctatgcaaggagaaaaaggaagaatttagttacaaagtgcggccagtcatttcctgctgataaaatagctgttctgtgaagaaatacagagggcctaatctctcaagttttggtttgcaccagaacattctagaaagttctgaggcgaagatgctactaatcagtcctcaatcccttctctctgcccaggtacttcctcattgaacgtgggaagaacatgtgtggcctggctgcttgtgcctcctatcccattcctcaggtataagccacggctgcacgggcaactgattggcagaccaagggaggaactggtccttcgatgagaatgccaccctggagaaaattgtgtggaaatccacccagaggccctctcactcctgagtctagacgcctaaagacaggaaggacaaacttgaatagcgacaagcccacccacgtgacatcatcaccagaaatacgcttggattgtggttttttaatgacccaaacccacgtggacctagaatcgtctctctttccagctctcttcatgtactgggagctgtaatggttaccttttctatgttgtgtattcaataaacacacagtaaatacctccctgggcgtaggtctctaactgacattcaattccatctctctggacagagaaagcatcgcttgcttgcttggagtatggttcgggtgctgatgcctgccagatggagatcccaggagggagagcaggtttagagattctgctgtttccaaacccggggaggaagaatggagcaaataggccaggatgtggcacaaccagggtagagccaagatctcatctatctctgtgactgctgttgctgtcactggctcccagtaggggtgccccaccacttcctcagcaggccctcctttgggtagcccttatgcccctgtcctctacaccgcatgccctcttctagaggctattctgcaggcctctcagctccaggggcttgtctacagccggctgtagcccttgggcctcctgagagctagaaacttaattggaaaaaaaatgttcatgacaaaatttgacaaatgtaattgtagtttaatctattagaaagttctagttacataagacactacaactaagtcaacccacatacacacacacacactcatcatcatcatcaccatctaggcaaggccgttcatatgaatcataaattcaaggcctgcctgggtcacttagtaagaccctgtctcaaaaactcaaaaggacttgtggggtttgtgaagtggctcagtgggtaagaacatctgctgtgaacataggatgacgagagtttaagtctttagcacccacataaaacctgggagtggccacgtgtgcttcaaacccagtgttggggatagaaaccggcagattcgtaaacagcacgctcatacgcaaggagagatgactgtctcaaaaaataagatggcgggctggaccggcagctccgctggcttctcttccagaggagcagaacccccacaggtgggtcagaaccctctgtaactcttccagcatccacctccattgcaggtccaaaccatctgtaactccaggtcctgtggatctgctgccctcttctggcctccaagggcattgcatgcatatggtacacaggtactcaggcaaaacaaacacagacaaaaataattttcaaaaattatatatgtacatatataataaacaatatagaaggtacttaatgtaccctggtggcctcagcacacaagtgtactcaagacacgtatgcacatacatgatacatatacatatgcacacacaagactatgtaagtcaatatacttgtcaagtacttgccaagactgtgtgaggctctaagttcaatttctagtgccaaacacacacacacacacacacacacacacacacacacacacacatactgaaaagacctaaacatgattaaaaaaaattttgtcatagttaaaaaataacatgaaataaaagtataactctaggtgtattaaagactcccaagtcaatggagagtggtatgagaagaaacccactgaagacaggaaatagcagcaaggtccaaggacaccacaactgctcaaaatgaacctgcaatctagctaccatgcttgtctatcattcatgaggccgtgggttcaaaccccagctccatggaaaagcaaaacaaacgaaaatggaaaagaactcagaaaatggctaatttaaaaatttttaaaaatttaaacaaaatcagaaaaaaacctatataacaacaaaatggtatctaggaataactacccaaagtgttatatgaagaaaataattaaattataaaaaactttgcaggtgtggtgacatacacctttagtcccaacactttcactgtgagtttagggccagcctggtttacatagcaagttccaggcaagacaaggttacagggtcagctccatctcaaaaaaccaacaacaagaaaattatgaaacaccccaaaaaagcacagagcacagtaagtatattctcaagtgataagattaatgtaaattgacttttgctagaagtagaaatataagtgtagtatatttccaactaaaatctcgaaacaaaaaaaaaaaaatattcagtttacctggggaaggagtaaagagtttttaaattttactgggttttagtcaattttaaaatatttagtttggggtctgaagagatagatcaacagtaaagagcactgaatgctcttctagaggacgcagattcaattcccagcacccacatggcagctcataacttagctgtaactcctaaatctaatatctttacacaaacatacacgcaggcaaaaaaatatcaatacacataattttttttaaagttaaaaaaatatatttattttggatgtgcatgcatgaggtcagaggagagcttgtggatatcttgccttccacaatgaagggtctatgtctcccactcgggtcactaggcttggctgcagcaagtgccctgacctcctgagccatctcatcagctgcaagataaaatccactttataaacaagtatcaagaagagattatttttgtattaaagacatataaaatgtcacccattaaggtagtacataaattaaggataattaacttcaaagaatctttaaaaatgggaaatgaagacatacatcagtaatagaagacagattttttttttctttttgagatggagtttcactgtgtagctagccctggatggcctaaaactccctgcataggccaggctgcctctgcctcctgagtgcttggattaaaggtgtacactactggcctatgttttttaccattcaataaaaggtgtcataaaattcacaattaaactactttaatttgaactctcactactatgttcttttaaactactatgttccatttaaattaccatgttctttcaaaacaccattttaaatttacaaaataattgcaaaactagagcccctctatactctagttattactaagatctggctgtgatatggcacctttgtcacaagtagtgtaccagttgagtccttccaatttttttgataaataaatgcaacttaaaaaaaaaaaaaggtaacatttgggtgaggctatagctcagtcaatgacacagtacaagtgtagtatgtaaaagtctcaaacattgtgcactgatcatacagagagagagagagagagagagagagagagagagagagagagagagagagaaaacaaaacccttggctaacatgtaaatggtgagatacagacacaagacaggaattggctctcaccagctctgtacagcagattatacactgtggtggtttgagtaaggttggcccagggaatggcagtattaggaggtgttgctttcttggagtaggtgtggccttgttggaggaagtgtgtcactgtggcgatgggctttgagacctttctggagctttctggaagttagtcttctcttaactgccttcggtacaagaggtaaagctctcagctcctccagtgccatgcctgcctagatgctgccatgcttcctaccataatgataaaggactgaacctctgaacctgtcagtcagtctcaattaaatgctttataagagttcccggggtcatggtgtctcttcacagcaatgaaatcctaactaagacatatatagcctgggcaatcagataggaggatggtagaacgggtgggtattcacattcaaagaagcaaaaccattctatccataaatggcaccctatataaagcaaaccgtaaggacacatactcttttaagagctgaaaaatgaaagatcatcctgaaggcttttgtaataaagtgaaaattccaacaggatttgcaaaaccttggtggtctagcatctgaaatatgtgaaaaactcctataccccagcaagatcccccttttattttatatttgcatctttacatgtaattaagcttttaattatatttttatttaggaaggggcgaggggacacacacatgttcacgaagcatgtatacagggcagaggaccaccctcaggagtctgtcttcttcctccacctcatcgctcttgggaattgaactcagtcttgtgggctagcacctttacccactgaactatctcactggcccttcctcctttaattttgtattgcaattgtttattttgtatgtgtgcacgtgtatgtgtgtagacatgcaggtaccacaatgaatatattgaagttagaggacaagttgtgagaattggttctctcctactttcatgtggaccctggggattgaactcagatcatcgggtttggcgacaagcacctttacccactgagcaaccttgtcatcccccaaaatgcctcatttgaggtgatagatgatggaactcaaggtagaatacttgattagcacagtaagatatctatcccccccccatccttaccatggcgttaaaacaaaacaaaacaaaacaaaacaaaacaaaaaaaccacttttgcaaacagtggttaatagctatattccaggagatgtgagaatggacaaaacccctttcatagacctgtcttctcattgctacagtgcagtgcctagactcttacagactatagcaatcagaatagtgattataaaaccaggcagtgtgcttgctgctatatgtgatgaaatcattacgtcatttttttcagaaaactgggatgcagtgatgatctagccgttaagatcacaggcagctcttgcagaggacatgggctcaattcctggtaggcacgtgatggctcagaaacatctagaactccagttttaagggatcccacaccctcctcagtcttccatgggcaccaggtgcctacacagtacacatacatacatgctagcaaaacatatacaagacaaaaatttggttgtttttatggaggccataggtaccaggggggaagtttgctaaatgaaaactgccttctaaatatctgtatttaggggtctggagagatggcttagcagataagagctgttcttccagagggcccaggctcactttccaggacttacatgacagatcttaactctctataactccagttccagagcgtcgtcacacagacacacaaaggcaaaacaccaatgcacataaaaacaaatttaaaaaattaacaaaaaatatttatgttcatgcccataaagagaagcttttttgcagaggacaacagtaactgcaggctcctaggtggtcacagtgttgaaatgaactgttgaggctctgccttaaatgggttagctattttcaccctgaatcacgtgtgacatgccaaagccctcgcatggcagaaagctaagaccgcacccacatcacacctgtcacaggaactatccaggaagcctgtctgctgggtcccacatggccttggtggggaaataatgacacagttcctacccttgggacaaggccagctgatgtggacctccagagtgttaatggctgccatgagcataaggttggtttgtataataacctacatattttcatattcctcagaggaatccatcctgaaatcaccatctctatcacatctgggcctaaactgtgtcccaggctgaccttgaactcaggtatatgtctgccgttgtgtctttctggtaagctggctcatagtgtagctgtatctgttcctttcgattagtgaagctccttatttatttttttgcatagttgataaattatatattttgagctttttttttagatttcttttccacagcctttttgttttgttttggtttggtttggtttttttttttttttttagatttatttatttattatatgtcagtacactgtagctgtcctcagacacaccagaagagggcatcagatctcattacgggtggttgtgagccaccatgtggttgctgggatttgaacttcggaccttcggaagagcagtcgggtgctcttacccactgagccatctcaccagccctggtttggttttttgagtcagggtttctctgtgtagccctggctgtcctggaactcactctgtagaccaggctggcttcgaactcagaaatcccgcctgcctctgcctcccaagtgctgggactgatggtgtgcgccaccatgcccagctcttttccacagccttaagggcagtcccgagggttcattttgctgagacattagccacacttccaccatcaggtgacttatgcttatcatagttattaacgttaacagaggacattccagaaagacacaacggcagacagatacctgagttcaaggtcagcctgggacacagtttaggcccagatgtgatagagatggtgatttcaggatgtatccctcttcaccatagtttaccatctgtgcttaaattctaaattcttttacaatgttaaaagaaaatgtgtgcttggggtctcctaagatttaaaggggtaggggttctggatgctgcttcccaggggaatcaaaaggaaacctggaataaataactgaattgacataaatttttaaaaacttgggttttgccaggcagtggtggtgcatgcctttaatcccagcacttgggaggcagaggcaggcagatttctgagttcgaggccagcctggtctacagagtgagttctggggacagtcagggctacacagagaaaccctgtctcaaaaaaaaaaaaaaaaaaaaaaaaaggaacaaaacaaaacaaaacaaaaacaaaaacttgggttttggtctgcatgaggtgagctagcagaaagcaatagtattttcttagaactttttctctgaagaaagctatctgaagatctctggaaaaataaaaacagctcaagaactttttctaacaggaatcctgatttggtgggaagattcaagaaattttttatagcagctcttctgactttggtcagaaaacccatgagctatccagatagcttttaaaatttttactagcagagattgctatctcaaaccagttttttaaatagaaaaaaaaaaaaaaaaaaaaaaaaaaaaagctgtctgagcaatctagaaagccatctcagaacctaggccatcagcttggacccacaatttgactttgactcatttgttttgctattaccaaacacccctccctccggaacctgacctagccaaggctggtccttggcacctgtcctgactcaagctatgttgtccaggctgggtttaatcatgcagtatgtctcctgtctcagcctccctagagctgggtttacagatttgctccacatgacccagtgtaaaatgctggactatggtggtggcacataactttaattctagcacttggaggcataagcataannnnnnnnnnnnnnnnnnnnnnnnnnnnnnnnnnnnnnnnnnnnnnnnnnnnnnnnnnnnnnnnnnnnnnnnnnnnnnnnnnnnnnnnnnnnnnnnnnnnnnnnnnnnnnnnnnnnnnnnnnnnnnnnnnnnnnnnnnnnnnnnnnnnnnnnaactcagaaatccgcctgcctctgcctcccgattaaaggcgtgcaccaccatgcccgaccctactgttcatttgttttgttttgttttgtttttaaagatttatttattatatgtaagtataatgtagctgtcttcggacactccagaagagggagtcagatctccttaaagatggttgtgagccaccatgtggttgctgggatttgaactccggaccttcggaagagcagtcgggtgctcttacccactgagccatctcaccagcccccgaaaactcacttctaaaaccaaaaagaaaatgatgttgcttttagctatagagttgtgctgggtagtggtgatatgtggctttaatgaatcaagagacagaggcaggcagatccaggatagtcagggctacacagagaaaccctgactcaaaggggaaaaaacaaaaactacccagttgtaagcttgtgaagcaaaccagaataccagaaaatacacttcacaaagctttcccaaagaatcaaaataaactaggaacgtgcacacttataatctccacacctgggaagacaagagacaggaggggcccaagtaccagataagcctaggctatatatttaattctagatcagcctgggataagaggagtgaggggtaggggtgggggaaaagaggatagggggagggacagcaaatctaaccaccactgtcttaattatcaaatggtcttttcatgagtctgcctcagcaaagctatgtctgaaattgctaagtgggcagcatcactgacaagaggtgtctcacgtgatgtactaggagtccactgaaggagagagcgagcagaggccttccttttgcctaggctcagaaaatgaggtcttgggccaagagctgatagaggcagcaagtcggaaggcttttcaactcttcaaggttccctctaatgactcaactgcagaagaaatcaccaagttatgagggtgtgtgtgtgtgtgtgtgtgtgtgtgtgtgagagagagagagagagagagagaatgagaggggtcaggaatcagtttgtttctctgggggggagggggttcaagacagggtttctctgtgtagccctggctgtcctggaactcactctgtagacaaggctggcctcgaactcagaaatccgcctgcctctgcctcccgagtgctgggattaaaggcgtgcgccaccacacccggcatcagttcttttcttacaccaaatgtgcccagaaggctgcaccctcgttgcacgtgggacaagtgcttttcctcacctgctcgaccatcttgcctggtcacaaagtacaggataaaagcccaggcctagtatctatgtaataaacccagtcactgccctcctaacactcttccacacattatcaccagcaacagtcaacaaacacttcaggctgaaatcagactacccagctctcgctttggacacctgtaaccccagaactccggaggcagaaagatctatgtagcctgaactacagaccaggaaatcctccggaatgaatggaggggaggagggagaaatcaaaaggaaacacattgctatagttcagatttctagaactggtcacaagggccaggctgtcatgtctttttcccccccagaactattttatgtatatgtatacactgtagctgtctttagaaacatcagaagagggcatcggatcccattccagttgaatgactcaccatgtggttgctgggaattaactcaggacctccagaagagcagttagcgctcttaactgctgagccatctctccagctgtcatttcttgactcaacccatttgctatcagccagcaccccaactattgtggtgctcattttgtcttttctttagtgacctcaaataccattcctagcactagcaccatgtacattataccctcggtatcaggaaaaaccacggccttggtgtaatggctgaagctttaattccaacactcaggaggctgaggcaggacaatcagtttaaggtcaacctcttctacgcatggttagatggcagtgacatgaaacccttttgcaggaaaaaaaatcatttctgggtataaagagatgactcaagattaacagcaccggcagctctcttccaggattgggctttgactcctagcaccacagcgcagctcacaattgtctgtagtctcagcccaggatgtcctcttctggcctccataggcaccaggagcacaagtgatacagacatacttgcaagcaagacacccacacacacaattcttttaatcattcttgaaggatctgactagtcatcgatgctgtcttttagtttttacttcaaccatttgcctcacaagaaaccccaggcaaactcagagcggttcagctgagcatgcaggtcttaagaaatgatcattctgatttgcatttccctgatgattaaggatgttgaacattttttcaggtgcttctctgccattcggtattcctcaggtgagaattctttgttcagttctgagccccatttttaaatggggttatttgattttctgaagtccaccttcttgagttctttatatatgttggatattagtcccctatctgatttaggataggtaa

SEQ ID NO: 1151 - DNA, 1582 bp, Mus musculus
ggagacggagttaccagagatggggacagacaggaaactggggattaggctgcgcttcctcccacttggcagggactagccttcagggtcagaccctgagaacccttcttcccaagagcaggagtgtaatggccacagggggcaggagaggaaccagcatcacctaggcggaggccagagtcgccccacctcctttccacaggctgggctcagagggcactcggtgggaccgggcagtgagcgccgagatgtgggctgcgctgccgctgctgtgcgctggggcctggctgctgagtactggggccaccgccgagctgaccgtgaacgccatagaaaagtttcactttaagtcatggatgaaacagcatcaaaagacgtacagctcggtggagtacaaccacagactgcagatgtttgccaacaactggaggaagattcaagcccacaaccagaggaaccacacatttaaaatggcattgaaccagttttcagatatgagctttgctgaaataaaacacaaattcctttggtcagagcctcagaattgctcagccaccaaaagtaactacctccgaggtacaggcccctacccttcctccatggactggaggaagaaaggaaatgttgtttcgccagtgaaaaatcagggggcctgtggcagctgctggactttctctaccacgggggccctagagtcagctgtggctattgccagtgggaaaatgctgtctttggctgagcagcagctggtggattgtgcccaagccttcaacaatcatggctgcaaaggaggtctccccagccaggccttcgagtacatcctatacaacaagggcatcatggaagaagacagctacccttacataggcaaggatagttcatgcagattcaacccccaaaaagctgttgcattcgtcaagaatgttgtcaacatcacactcaatgacgaggctgcaatggttgaggctgtggctctatacaaccctgtgagcttcgcctttgaggtgactgaagattttttgatgtataaaagtggcgtctactccagtaaatcctgtcataaaactccagataaagtaaaccatgcagtcctggcggttggctatggagaacagaatggattactctactggattgtgaaaaactcttggggctcccagtggggggagaatgggtacttcctcattgaacgtgggaagaacatgtgtggcctggctgcttgtgcctcctatcccattcctcaggtataagccacggctgcacgggcaactgattggcagaccaagggaggaactggtccttcgatgagaatgccaccctggagaaaattgtgtggaaatccacccagaggccctctcactcctgagtctagacgcctaaagacaggaaggacaaacttgaatagcgacaagcccacccacgtgacatcatcaccagaaatacgcttggattgtggttttttaatgacccaaacccacgtggacctagaatcgtctctctttccagctctcttcatgtactgggagctgtaatggttaccttttctatgttgtgtattcaataaacacacagtaaatacctc

SEQ ID NO: 1152 - protein, 331 aa, Mus musculus
MWAALPLLCAGAWLLSTGATAELTVNAIEKFHFKSWMKQHQKTYSSVEYNHRLQMFANNWRKIQAHNQRNHTFKMALNQFSDMSFAEIKHKFLWSEPQNCSATKSNYLRGTGPYPSSMDWRKKGNVVSPVKNQGACGSCWTFSTTGALESAVAIASGKMLSLAEQQLVDCAQAFNNHGCKGGLPSQAFEYILYNKGIMEEDSYPYIGKDSSCRFNPQKAVAFVKNVVNITLNDEAAMVEAVYNPVSFAFEVTEDFLMYKSGVYSSKSCHKTPDKVNHAVLAVGYGEQNGLLYWIVKNSWGSQWGENGYFLIERGKNMCGLAACASYPIPQV

SEQ ID NO: 1153 - DNA, 43344 bp, Homo sapiens
gcctgtgtgtgcatacctaggtaacaagcatctaaccagctcctgacctccccgagcccatgacccagctgaagagtggaaaaccacaagtcaaataacatgtgtctagctcccagcccacacatcactccagactccagatccttatagccaaccacctagacgccgtctcgatttgggggccctatttccacctccaattcacctggaccaaactgacctcattttctccatcatatctcagttccttcaacccccaactcagttgtgcaggccagaaccaaagttaataataaatgtcagagcaagggtctcctgtcaggttcaccttcccttcccacttccctgccttcgtcaaagctcttccctccaccctgagcaccatttttgctctgtcttttctgcctttccaaatcccatccttcttcaaatgtccttccctccaggaagcctttcctgattttctcccagccaagggcttcatctgtacccatctcaggtcaataggctctatctgatggcacagacccatgtcacttccctcacacgagattctacatgggccagggaagtctgacttggctattgtctcatgcagcaaactgatccatgtctgacccatgggagatgctcaggaatcaggtctgattcaaagtggggctccacaaaaaaggagataaagtggacttcacccaaattataacttctgtgcatcaaaggacatcattaagaaaatgaaaggacaacctatagaagggcagaaaatatttgcaaatcaagtatctcacaatggtttagtattcagaatacacagagaacacctataactcaacaacaaaaaccagacaagccaattaaagatcaattagccaagcatggtgatgggcacctataatcccagatacttggggtgctgaggcagaagaatcgcttgaacccaggaggcggatgtttcagtgagccaagatcgggccattgcactccagcctgggcaatagagcaaaaacttcatctaaaaaaaaaaaatagacaagagattcgaatagatatttctccagagaaaatgcacaaatggccaacaagcacatgtaaagatgttcaataccactggtcattagggaaatacatatcaaaaccacaatgagataccacttcatgcccactagaagagttatgatctaaaaaaaatggaaaataataagtgtcagtgagaatatggaaaaataagaaccctcatacattgctgatggaaatgttaaatggttcggctgctgtgaaaaaatagtctggcagtttctcaaaaaataaagagagtcaccatatgacccagcaagtccactcctaggtttatatccaagagaaacaaaaatgtgtctacacagaaactggtacacaaatgtttatagcagcattattcataatagccaaaaggtgaaaacaagccaaatgtccatcaacagatgagtggattttaaaaacgtagtataggccaggtgcggggtggctcacacctgcaatcctagcactttgggaggctgagcctgaggatgaattgcttgagctcaggagttccagatcagcctgggcaacatagtgaaaccttgtctctacaaaaaaaaatacaaaaattagctgggcatggtggggagtgcctgtggtcccagctactcaggagagtaaggtgggaggatcgcctgagcctgggagatggaggattcagtgagctatgatcacgccaacgcactccagcctgggcaacagagggagactctgtctcaaaaacaaaaacaggtcccgtcgctactaaaaatacaaaaattagctggacgtggtggcatgcacctgtaatcccagctactcagggtggctgacacaggagaatcacttgaacccggaggcagaggttgcagtgagccaagattgcaccactgcactccagcctgggtgacagagcgagactccatctcaaaacacacccacacatacacaaacacacacacaaaacatagtatagccatacaataaaatattactcagctttaaaaagaaataagtactaacgcatgctataacttggaagaacctagaaaacattacgctgagagaagagagacacaaaaggtctcttatcatatgattcctcttacatgaagtgtccagaataggcaaatccatagacacagaaagccgagtagtgggtgccaggggaatggggtggggagaggggaatgaggaataattagttcatgggtatggggtgttctttgcaggtgatgaaaaagtttggaaactagagagaggtgatagttgcacaacattataaatgcactaaacacctctgaattatacacttcaaaatggcctatttcatgttatgtgaattttgcctcaacaaaacaagaggaaaactggctgtaactgctcattcacaaagcacttcagatgtgatcaggagattatgtagattaatgggataactgaattgcataccttaaaatggctgagtatatgatatatgaatttcactttaattttttaaaagttaaaaaaaaagaaagaaaaagggattggcaaggcagagcttctcagaggaagggtcttaaacttgttcttgaaggaatagaagaagcccagggtttctggagagaagaggggctggggtgacccagataaggtagacgtaagtgatgggttgagctgcaatggggtgaggagtccagggagagagggaccctgggggcggcagggaggtagaggcaggtggcgggtgggtgggcctgggtatggggctgggtgggtggctggtcccggaagtgtgcagaggcaccacaatagggctttggtgctgaaatcttgcaggctcagttcctacctggcctgattccattttcattcagtcaagcccttatcagcccttgtttgcttgtttactatgcaattattacccaaatcagaccaagtgactcatgacccagaaatagtcaaggcccttctcatcgccaggaaggggagttaggaatgttctgctcacgtcgggcaggtccaagcaaacttgcaatcctctctggtcactgcctcttctgggtctctccatggccccaactgtgcctttctatttctttgttccctctaaaccttgcacccacctgcaaacaccatccacccatttttgcttctctcgagagacttctcaaggcacccacaagcctaatcaggaggtgagtacagcacctccaaatgtctttattccaggacccgaagcccttcaaacatcaccttcaatgccacaagccttttaccatctgactcagaataaacagtaacaaccactgctactgctactgctaccatttgtgttgtgcctgcagagagccaggctctgtgtttgagcactaacacacgagtgtgttccatttcactgaagacacaggaaaccagggaagtgattttcaaaatatttaaccaccagtgtggcgtgggcactgaaccactcagactcacggccaaactggtacaaactggctaaagatcagtcagctgcaggaaaccctgaaaagtcataaaggattaaacgtgagtgtgtggtgcagattattaattcaggagttcaggaagaggaagtttccgtagaggaaaaattcaactggggtgaaatttggaatgggttggggacggtgtggctaagaggagaggtgggcagaagaattgggatggggctgtgtccaggacaggaagtagacctgtgaactgatgctgagtgcagtggtggtgggcattacaagcaggataaggaaaaatcacagagggtcctaagtgcaaagcaaaggagtataggctgtgaaaatttgtgaacaaagagagactgaaggaggccctggagaagaaacaacgaggctgtaactgtgggattcagaactcctgcctctgaactccaacttcccctagaggtaggaattatgccaactaagctgggataagctcacactgcacgggagtttgcagcttgcagaaaagtccagaaatgagtactctgttacagggccaggactagggcgagagcagtgaggcatactactgaggtgcaaaatgtcagggagtgtccaaaaatgcagtaatcaagataaataatacttgaatgcaatgttttaaaatgaaaagttaatgcaaaaaacacatggtgagcaaaatgtcacgttttaaaaataaatatgggatcaggcagtcgctcgcgcctgcaatcccagcactttgggaggccgaggcgggcggatcacctgaggtcaggagtttgagaacagcctggccaacatggtgaaaccccgtctctactaaaaatacaaaaattagccaggcgtggtggcgggtgcctgtaatcccagctactcaggaggctgagacgagagaattgcttgaacctgggaggcggaggttgcaatgagccgagatagcaccattgtactacagcctgggcaacaagagtgaaactccgtctcgaaaataaataaataaataatcgacctttggacttgcacagcataacctcgctgcttcaccctgatcctggctgtgatgaaacaccagcttctggacttttctgcaggtctccacacttttcttggctgtgggtgcagcatctccagggtttggccaaaggggtggtgttctccatgttctctggctttccaggggacaaacagtgccttctcattcagtcaatggacatttttcaggctggaattctctgacccacagccaagggaagtaatcaaggtggctaggcaggatgtctcctggccaacagaactaacaagagttcaaattcacattacaaggcagctgaagctcctttggtggctgaacctccttgatgcggacttacacccctactgtattcgttaccttttccactctacaaactttggtcactcatccctgcatccattcatccctccttccacccatccatccaacaatacagctgttggtccatcttgccatggacagagccgtctatccagccatcccttcttctattcattcatccacacatgcatccaaacacatagccaggcacccaaccactgagccaatcccctaccgacctaccatataaaatcagcctgtggatgtggaaggagtcccaccccttaccagcaggcctacttaacttctccaagtctcaatctcttcatctgaaaattgagtatgtgtatgctcataagggccttcacagggttgttatgagcagtaaataacaaaacccatgtgaatggtggctattatattaccatggtaagaaaatgaatgtggcgaaaggcccagcttgtctgctacaatgttggctctaacaggtgatctggaaaaccagtcaaacctgtagttaacagttgtggggggtgggggaggggggtgataaagttgtgttatcctttttgttatccccagattcagcttaaggaaaagaataaatggatgtggggcaggtaacaatgactagaacattcatgcaggaggcattctgcatgcaggcagtgactgcagattccaggacctgtggttagcggactcctattgatgtttctgggaactctagacctggaagttcaggtaggtaggcaagcctcaggactcatcgtcatcacttgttcccatggggcaaatgctttagtggagaactctggactcaggtagccaggggttcatgcaggggttcaaatcccactcttacttacttgtgtggccttagacaatgtacgtaagtgcctcaattaccccatccgtacaatggggattaagaagtgaagattctgctgatacggtggctcaggcctataatcctagcactttgggaggccgaggcaggtgggttgccggagctcaggagtttgagacccgcctgggcaccatggagaaaccctgtctccactaagatacaaaaaattagctgggcgtggtggtgggcacctgtaatcccagccacttaggaggctgaagcaggagaattgcttgaactggggaggcggaggttgcagtgagccgagatcgtgccattgcactccagcctgggcgacagagcgagactctgtctccaaaaaaactaaataaaaataaaataaaaggtgaagagtcacaaagtttatttgtgtgaggcacttggagcagggtccaacacatccccacaagaggtcatgactctgaccatggataggcctgttctttgcccttggcctcccagcccccatatgcaccagaccttcagaccaatgaggcacctgccagtttgggtgtttcatctggtgtattggtttcttcctattgttgtgttctaattaccacaaacttagaggcttataatagcacaaatgtactctacggaagttctgtaagtcagaagtccatgtggacttggttggttccctggagggtctgggggagaatctgcttccaagctcattcagagggctggcagaatgcagttccatgctggtgaagggctgaggtcctggtttccttgctggctgtcactacggttatttccagcttctataggttgcctgtgtaccttggctttggccctcttcaaagccagcagtggcagatagagtccttctcatgattcagcgctctctgaccccacctgcctcatcccccctctgacttctccgacctctccttctgccccctctctccgactcttctcctatgctcttctgcttctaaaggcccacatgattccacagggcccctcggataacccaggataatcctatttaaagtcagctgattcaaacgttgattccatccgcaaagtcctccatggcagtcgctagattgtgcttgagtgaataggaagctttcgagttctgcctaccagccctgtccagccaagactgtgccagcagctgcagtcctcagcctcatttctgtagaggtgcagaggactggaaccacggagaagccctccagccagctggagccagagggtcagacaaactcaccatgaaaagtgtgtgcaggtagcaaaggataaaaagcacacaacggagcatcagaaaagcccatgcatggggggagtctctattctggtgccatgctcagggccaggtattttacctataattatatttaaactgcatgaccgtatctaactaccctggaaagcagggatacttgctccattttacagatgaggaaactgaggctggtgggggggaggcgggggggaaccatttgcttaggtcacacagtgaatctgtagtagggctagaaccaaacattggtctccaattaaccaggtcagtgccctccacatctcagcacccaggggccctggcctgctggaacgatccacaaaggagggtcaccagggacctagcgcaggaggcagctctggggcctgaggtctagcatgcagagctttcaattctgacatcctccaagtggctgggatgggcagaggggtgaagcattccaggtacacatgaagggcaggacatctgcctagaaggacacctttatcccaaggccagcgacttctgttccaaatagtaaccgagcagggtcttttctgagacatatgcctcaaagcacagagagactggtcacacccagagaggggcatccagacagagatggagtcacaacctaaggaagatctgctttatctgaaaaaaggtgcctgctggagctcaccctggttccatggagattccatgtccacatgccacactggccacaggagaggagagagactgtgggggaggctctttaaatgcagatttctgagccctacccagacccagtaggtcatatcccaggaaagaagtccaggaatctgcttccccaggtgcctgagacacagagtctgggctagaacatcaggggatgaaacaccagtcggagggaggccacgagagagctcagatctggctctactcacaggttggaaagatgcatttttaaaaagagagggaagggcacagaggctcacatctctaatcctagcactctgggaggctgaggcaggaggatcacttgagcccaggagtttgagaccccatctctactaaaaatacaaaaaaactagctgggcgtgatggtacgagcctgtggtcccagctactcaaaaggctgatgtgggaggatctcctgagcctgggaggccaaggctgcagtgaactgtgatgatgccactgaactccaacctgggtggcaagagagccaggccctgtctcaaaataaataaataaaaatttaaaaatgaagagacagagaaagagcaagcccagagcagagagcactgcagtaggtcaaggctgggttcagacactctctgcgcacagactgggaaagttaccatctactcttgtggcctcagtttcctcatctgtaaaatggggggtcaacaacatgccactttgcaaggtgatgatgtaagtgaagaacagggcatcactgggcatttgaggctacggcacaggctggtctgaatcaccctctcctcacccaaagcagtgacagcaccggcctcctcagcctggaacgcacgttcttctgtctgtctcacacccagacccttacataccatcttctttagctttgcaaactacagagaatggccctacagctcttaatgtagcttcctcagcagaaagactaaaatgtctgttgagggggcaaaacaattcacaaggaggtcgtctagcttcttcagttgtaagtccactccaagcaaaagggaagccagggaaatgtggttaaccagggcagggagacgtggggagtgtgggggaaagtctgaggtggagacacacagggacatggggggtatgaggtggggacaggcagggagatgggggtgcaaggtggagacacgcagggacatgagggggtgtgaggtggggacaggcaggaagatgggaggtgcaaggcggggacaggcagggacataggggtgtgaggtggggaaatgcaggaagatggggggatgtgaggtggggactggcagggatatgggggtgtgaggtggggacaggcagagacatgggggtgtgaggtggggacaggcagggacataggggtatggtggggataggcagggagatggggggtgcgaggtggggacaggaagggacataaggctgtgaggtggagacaggcagggacatggggggtgtgaggtggggacaggcagggagatggggggtgcgaggtggggacaagcagggacatggggagtgcgaggtggggacaggcagggacgtggggcgtgcgaggtggggacaggcagggacataagggtgtgaggtggagacaggcagggacatggggagtctgaggtggggacaggcagggagatggggggtgtgagttggggacaggcagggagatgggggggtgcgaggtggggataagcagggacatgggggtgcgaggtggggacaggcagggacatgggggtgggaggtggggacaggcagggacatagggggtgggaggtgggcacattcagggagatgggggtgtgaggtggagacaggcagggacatagggggagcgaggtggggacaggcagggagatggagggtgcaaggtgaagacaggcagggacatggtgtgaggtggggacaggaagggacatgaggggtgcgagttggggataggcagggagatgggggggtgcgaggtggggacacgcagggagatgggggacgtggggatggcgacaggctgggagagggagaggccaggctgagacctccccgcgcggtgccagccagtccaggcagatccaggactcagccaggcctgatacccagataagcccttcctcccagaggagataagggagcgacgcggccggccgacaggtgaactagagctggcgagttagtcggcgccgccccctcccgcgagcccggcctcgggggagtaccgcccaccccgccccgcgctcgctccgccccgcgctcgctccgccccttcgcgctcccgccgctcctccacgctcgtgccgcccccccccgcgctcccagttgacgctctgggccgccacctccgcggaccctgagcgcaagagccaagccgccagcgctgcgatgtgggccacgctgccgctgctctgcgccggggcctggctcctgggagtccccgtctgcggtgccgccgaactgtgcgtgaactccttaggtacgcagagggcgcgccgcccgagagggtgctagcaggccctagagtggacgctgggagaacttggccaggggcgcactgggctccggaggaacggggcagagctttccccggtgagaggccaggaactctgcgtgctggcacggggaggggtaaactgcattataggcgggggttctcggagggtgggcggcttgtaggaccagaggagcagatgggctgagtgtccagggtcccacctagccaggtggctctccagcctagaataccaaaggagcccgcagctccttccgccttcctcaactggggacacagagtgtcacacagaggactctgatctgtccctgccagaggtgagcaaggacgtcccagccttctctagcagcttcccccgggacttggcacacaggggatccccgtagtgtcttgggagtcccatctgtagagtaggttggacgggctgtttggaacagtgaatccctgtgcaacggcaccagggaaagcactcagaccaacagcgcttttaacagcaccccagggcccatggcgtcaggtggagccccaggactcctcttgttggccaggttggctgcgactggtccagcttcgtgctgcccttgcatcctgtctactgcccgggctcaggcacctcccctggctgaaggcaaggagcctgctcttccctactgcctccctcctttcctactgtccctggtcccagcctcagcccacaggctctgaacttaaagaccacctgcccccttcacagagaaaagtagccaagaaacaacccaaggagccaagaacctagggagggggggtgccctgagctctggaggaacgggacagggctttcccccagctagaggctcaggggatgggacagagatcactgaggctgaatctgggccagagggttgcctcattccttcccacctatttatttaaaaagctccccagccttgcaaacctcagtgggcgcccagctccaggtcagttcccgcctaaggaaaacctagctgccgcaagcgagggctgcctggagaaggctggcgctgagaggctgtctgaattccagagcagggcttggcaaactttttctgtgaaagaccagacggtaaataacttaggctttatggtggtctctgtagcaactactaactctgccatggtagtgtgatagcaaccatagattgtatgtaagtgagtcagtgtaactgggttctaataaatgatttttatggccactgaaatttcagtttcaagggatttttgggtgctacgaaatatgtttcttctaaccatttaaaattgtaagaaaccgtttgtagcccaggagctgtactaaaacaggagtcagggaccggctgcggtggctcacacctgtaatctcagcaatttgggagaccgaggcagtcggatcactttaggtcaggagttcgagagcagcctggccaacatggtgaaaccctgtctctactaaaaatacaaaaattagctgggtgtggtagccaggtgcctgtaatcccaggtactcaggaggctggggcaggagaatcgcttgaaactgagaggtggcgatcactccagcctgggtgacagagtaagactccatctaaaacaaacaaacaaacaaacaggggaatactgtactttcctgaaacctgctgtaaatccaggcaaggtattatggcacttttaaagtcctgactagattggaatggatctattttagggtaaggcacggttcaccagcagattattctggccccagaataatctctccggaggcaaactggtagtcaattgtcctaaactcaaaccctgcctccaactcttgtcctgagttgaggtctgtcttcctctaaagccctcagctgcagcagggcccttaatcaagatctggaatcccctgaaaccctaaagggagccatgttgaggaaatgtgcattttccccagggaaaacggccatagattggtctctggaacaggttcgagacccaaaaacggagatctaaatgctgtgtggtagtgatcttcacactggaggtatggatccttggggaaacacgaagatatttcaagtgatgccggcagagagtgttctggaaatccatttacagaccttttatttccaagtgtcctctttgctaaaactgggagagagcccctgaaggcaagggggaacctctttcctctcattcaatctgaacctgaacccatgggtataaaaacaatagggacagcaaacaaaaagacaaaacggtaataaatcgttcatatctggcattctcaattcctcaaggaaactgaattgaagaggagaggacttcatggggatatcaactgatgaggtcttaaaaataatgttgagtgaggccaggcgtgggggctcacgcctgtgatcccagcactttggtaggccaaggtgggtggatcacctgaggtcagaagtttcagaccagattggctaacatggtgaaaccccatctctactaaaaatataaaaattagccgggcgtggtggtgggcacctgtaatcccagctacttgggaggctgagatagaattgcttgaaccagggaggtggaggttgcagtgagctgatatcgtgccactgccctccagcctgggcaacagagccagactccttctcaaaaaaaaaaaaaaaaaagaaggaaagaaagggagggagggagggctgagtgatagagcaccatgggattggatgcacagaaaggagtgcgaagaattaagtggcattgctcttaaaaactgcctccattcccagctgcttatttgagcagggtttcccagccctttgacctataagaaacaaaaataagaccagaattaatgctgaaccttttctcaaccaaacaatattcactcatgaaaatataaatccattgcgggggatgggcagtagagtactgtttatcacattaagagatgcatttctggtacaattttacttttgatgtttaacaattacttttcataatgtataatacatttgaaatgttttaatcagttgggacactaataataattatgattactcaatccagaataaattttttttttttttttttgagacggagtctcgctctgtcgcccaggctggagtgcagtggcgtgatctcggctcactgcaagccccgcctcccgggttcacgccattctcctgcctcagcctcctgagtagctgggactgcaggcgcccgccaccacgcccggctaatttgttttttgtatttttagtagagttggggtttcaccgtgttagccaggatggtctcgatcttctgaactcgtgatccgcccgtctcagcctctcaaagtgctgggattacaggcatgagccaccgcgcccagctccagaataaatttttataatattcacagatgtatgggtcacaggtagtaaaaacatttaattttttttttttttttttttttttttttagacagagtctcgctttgtcgcccaggctggagtgcagtggcacgatcttggctactgcaacctctgcctcccaggttcaagcaattcttctgcctcagcctcccaagtagctgggactacaggtgcatgccaccacgcctggcttatttttgtatttttagtagagatgaggtttcaccatgttggccaggctggtctcaaactcctgacctcatgatccacctgcctcagcctcccaaagtgctgggattacaggcatgagccacggcgcccagccaaaataaataatttaaatttaaactttttgttgttgttgcagaaaagaatgtgaaggtgatcaagcataaaaatgtatgttcccttaggataaaattctgccaggtggggatggagataggtgttcaacaagaaaaagaaactctgtataatatctgactcttttttgttttgttttctttatttgagatggagtttcgctcttgtcacccaggctggggtgcagtggcacaatctcggctcacagcagcctccgcctctcaggttcaagcgatcctcctgcctcagcctcctgagtagctgggattacaggcgcctgccaccatgcccagctaatttttgtatttttagtggagctggggttttgccatgttggccaagttggtcatgagctcctgacctcaggtgatctgcccaccttggcctcccaaagtgctgggattacaggcgtgagccaccacaccccgcctaaatacctgactcttatagaaaagtttgttcatgttactgatggtggatatcaaatcatcatggtatttagattccactggctagctttaaaagaatgatataacaatcttatttttagagatttttttttttttttgagacaaggtctcactcctgtcacccaggcaggaatgcagtggcgctatcatagctcattgcagcctcaacctcccaggctcaagtgattctcccgtctaattttttttatttttttgtagagacgaggtctcactttgttgcccagactggtcccaaactcctaggctcaagggattcgcctgtgtcagcctcccaaagtactgagattataggcttgggccacactgccaggtgttatttttaaatctcaatatttataagttggaatatgtctttggaggtattcaaatttaaaatgaaatgtttagataagaacatacatggggaaatacggcaggaatccaaaaacaaatggctggcctgcttttgtaaaatattttgtcttgtttgttttattatgtttttgataatatctgtacatatttgggggtacatgtgaggtttcgtttttgtgaagtcttgcgggaacgcagtcctacccattaatgttcacagtctctgtggctgtctctgagccgcaggggcagagttgagtagttgtggcagagaccatatagacggcaaagcctgaaatatttactacctgtccccataaggaaaaacagtgcttgcccttggaatagataggtttgttttttgttgttgttgtttttgagacggagtctctctctgtcgcccaggctggagtgcagtggcacgatctcggctcactgcaacctccgcctcccgggttcaagcgattctcctcagcctcccgagtagctgggattacaggcacacaccaccatacccagctgatttttatatttttgtggagacagggtttcgccatgttggccaagctggtcttgaacccctgacctcaggcaatcggcccacctcggcctcccaaagtgctgggattacaggcatgagccaccgcgcccagctggagtagatagctttttaaattaacttcttaccgaaatataacttcatacagaaaggggcacaaatcattgagtatgcatttccacgaattttctcaatctaaacacactcagttaaccagcgcccagttgaagaaacaggatatgagcagcatcccggaagtgctttctgcaccccgacccagtaggcataaccaccatcctgactttcaacaccattgactaatagtatatactttttcacattaatttggggtacaaaaccaggaagagtcggagtttctttttgcattctgcattatataacaccatttttggtgttttaaatttagtccagttttcgaaaatgcaaatcagttctaaagtgccctactttgctatagactcaacattactgtgatgcgcccagacctaattttttttttctttttacagagaagtttcacttcaagtcatggatgtctaaggtcagtgcccaacttcttctttttgaagtttttcatttcacaaagtttcctgttatcaaaccaaactgtcccagatttgagacaatgaaaaagggaatttccaactttgcctagtggggtctttccagaagttgaactggccaaacactgggaaagatgcagttaagtaaattccttccaaatagtggtcccaagtgattaacttggctgacagccttccaagccctgggattcatttctgtattttgttttcaaagcacattgtggagaatgtaaattagtacaaccattgtaaaaaaacagtatggaggttccatcaaaaactcaaaacaaaactaccatatgacccagcaagcctactactgagtatatatccaaaagaaaggaaattagtatattggagggatatctgcaccctcatgtttattgcagaactagtcacaatagccaagatatggaatcaacctaagtgcctatcaatgggtaaagcaaatgtggtgtatgtacacaacggaatattattcagccataacaaagaatgaaattctgtcatttgcagcaacatggatggaactggaggtcattatgtttagtgaaataagccaagcatagaaaggcaaatattacatgttctcactcgtatgtgggagataaaaaagtggatctgatgaagaaagacagtagaatggtgactagcagaagctaggaagggcagggaagcagggatgaagataaactgattcctgagtacaaaatatttttttttttttgagacagagtctcactttgtcacccaggctgaagtgcagtggcacactctcggctcactgcaacctccaccttctgggttcaagcgattctcatgcctcagcctcctgagtagctgggattacaagtgtctgccaccatgcccggctaatttttgtatttttagtagagatgggggttcgccatgttggccaggtgggtcttgaactcctgacctcaggtgatccacccgcctcagcctcccaaagtgctgggattacaggcgtgagccactgcacctggcccaaaaataattagaagaaatgagaccaagtgttcaaaaaacaagtagattcaactgtagtaagcaatcattattttgtatttccaaatagctagtagagaataatttgaatgttcccagcataaagaaatttttaaagtaatggatctcccaatgaccttgatttgattattacacattatatgaatgtatcgaaatattacatttaccaaaaaaagtacatcagttatatatcaataaaaaattatacacatttgtttttagaaaaccaaagcacactgtgtactggttgcagaatcagttggggaacaccagtgcatgtgcttttgaaaaatggtgatctttgctgtaaacttgacccagcaccagcagtggcgtccaggagtgccccacatgtggcaggtttgttcaccagtgcctcttggaccacattctgactttcacgcagctgcatggtcttcattctggccacaggtccctgaaaacggggttgttttgtaacttcccaaatttctcagcagtaccccgcccattaacacagatttggcctgagaatcatagcagaaagaaaaccttcatctttcctcttaggaaaacaaaaaggtctccctctagggagctgcagcctgtttccatgacttgctactggcgtgttttgttttagcaccgtaagacctacagtacggaggagtaccaccacaggctgcagacgtttgccagcaactggaggaagataaacgcccacaacaatgggaaccacacatttaaaagtacgtggaacgccttccttccttcctggaaggatgtcagttagtgacccagcccatgaaagggcccgctgggggctggtgggtggagggagcagaagcccaggctctgaagctgtgtttggctgacctcagattgtggctccgctgttactctctgtgtaatgtgggatcgtaaatttgggacaaagccggtacccctctgggtggttgtgaagtttacaagagactctgtagaagcccctgccccattcctgccatctgagggtccagcctggaagccaaggtctgtctttggattgttgcggggggtaggggttgctcatgggctcagagcagcccctgggagcatctgccttcactccggattaatttcactagaaactcacataggccgggcgcggtggctcacgcctgtaattccagcactttgggaggccgagatgggtggatcacctgaggtcgggagttcaagaccagcctaaccaacatggagaaaccccatctctactaaaaatacaaaattagccgggcttggtggcgcatgtctgtaatcccagctatttgggaggctgaggcaggagaatcacttgatcccgggaggtggaggttgcggtgagccgagatagtgccattgcactccagcctgggcaacaagagtgaaactccatctcaaaaaaaaaaagaaactcacacgcacgtccagcgtattttctgaggactctgagaaatattggtagttgactaaattggtaataaaggcatcaagcatgagctggaaagaaacttgggcttgaacctcatttctgcccagtcctagcctgtgacctccagggatgctaacatgggcagtaaagaggaaatgagcccaggtgtggtggcccacacctataatccctaaagacagggtcaggagttcgagaccagcctggccaacatggcaaaaccccatctctactaaaaatacaaaacttagccgggcatggtggcaggtgcctgtagtctcagctactagggaagctgaggcaggagaatcgcttgaatccgggaggcagaggttgcagtgagccaagatcgcgtccctgcctccagcctgggtgacagagcgagactctgtctcaaaaaaaaaaaaaaaaaaaagaaaagaaaagaaaaagcagaaatgatcacgcatccctgctggggctgtgtagagaccaaattaggcagcaggtgggaaggcccctggcaccagtggagtggttctttacctagctatccatcagactcacgaggggagtatctaaaaaagtaagtgcccaggccccaccccagaccaactgcattagcatctctggagtacggcccggacatctataccattgaaaaagctccccaggtattttggcagcactgtaagggctgattgaattatctactgaattatattaaatacaaaaacttaaaggagatgggttgcagtggttctaaatacgacacaggtaaacaggaggtttcatcactttttcttgtttcttcattagtgattcactaaccatttctgttttggttttttccttctcttttgtagtggcactgaaccaattttcagacatgagctttgctgaaataaaacacaagtatctctggtcagagcctcaggtaggtataattcattgcaaccaaatctgaatccttttactgaaacctttggaataaatttggagcctgctctgcttctaggcagattcagtcccatccccagatgcagctgagggtatccccagattctttgggggaaccagaagagtcagctctcagcagttcctcagtccaggcccatggccttagcattgtggacccttaacttagggctaccagattaaaatatagatactcagttaaaaatgaatttcagatacacaacaagtaattctttagcataagtatattctaaatattgcacaggatatacttacactacaaagttatttgttgtttacctgaaattcaaatttaactaggtgagctgtatttttatttgctacatctgtctaccctatcctaatgctctggactctcaaggggacatgtcatttagcacttgggaccagtagacaggagagggaaggttctgagagctgcagcctttcttattctctcttggtgattccatgtttatacatttcttcttcttgttgtcagaaaggtttttggttttgtttattttcctgaaaataatgtgtttggttgttccagaattgctcagccaccaaaagtaactaccttcgaggtactggtccctacccaccttccgtggactggcggaaaaaaggaaattttgtctcacctgtgaaaaatcaggtatgcctggcaatctccatcctctccctgcaaaacggccacactcccagacaatacaccaggaagaacaactcaaaaggtccacaaaaccaccacaagcacatccctgcctctgtttcctctcggcatctctccagccctcttcctttgaggggccagggaggtcagcacttctctaggctgctctggaggatgcaaaagttcctctttattgggctaaagtttactcccttccttccccacgccccagattttcccattggtcccaggtctctcctacagagccatccaaaacgttatgttccctgtgcccatctggacaccagaaccccatgcatctcctcttcccgcctccatcttctccgagccaccagggtccagcccctgccctggctggccgcctccctctggttagtccatgtgtcatgcatcagcaagcttctcatggcaggggctggcctccgtggcccttgctgtggggcacagagggcttggcaaggtgagaggccctgccttcctccatgggggagcagtctgggggcatctcagcacaggccctgtcccagagagtctggaccctgcccccgctgttctcccggcctgctgcggcccctcccctagcagggaacctgccgtggccttcttcagaaggatgccgacctctggactctaggaaatatgaggtgaaggtttccttcctggaaactcctggctttccatcgaaattctccatgagaaatgttttttcactttccaaaaagccatccatgcagcacagctttaaagcctcccgggcttgcagtgttcctggagcctgccaagtgctggatgtttaactagcatcaggagccaaagcaaacctccccttgcagcaggaggtggagtagaagcctgcctttgccccgtgacatttttagaccctctgagaaccacatgacaattcagagcaacacgtaacctaaacctgcccaccacttggacaggtgggaaagagaggcccaccaagaattttccaagtcctcctgttaactgatcctgggccatcaggcaggacgcagccggctgggctaagggagcggaatgaggtgcttcctgacgcagatgtgtgccgtctcttactgtggccgctgtgtggggatagagacggacagcagccacagcgtccatcagctcagcaccctccttgagagtttctcactttacagagggagagcctgagagggagggtggtttgcctgaggtccaaggtaagtaagtgacaaaggggactcaaaaccaggcccctgccccaagtcgagcacccaagggtcagccgagctccgcctccttcagcagtgagcttagtctcccccgaagtggccacgtctgcctcgttgactgtctcatggaccctctcaccaggccgtccctccctcccccagctgagagagatatgtgaagggaagagattgggtgaggccagtgtcaacctagggtgatgacctgggaggcaggtaggggacttaagagacatttcagaagtagaagctggaagactgaaccagcaaggtgaggaaacagagatgaacctgagagaaatccttacagcagccaccagcattgtgcccacgggggtgactgcctgaccagcagaatctgacttaaccctgctagcgccctgcaagcaggaaccctcgccattcccactttacaagcaatgaagccaaggcttcgagaggggaagtgacttgcccaggtcacccacctggtgtgtggcagagctgggatgtgaaccaggcaggcaggctgcagccccccacacctaatcctcatgttattctggaggtgttgtgaataagggggctaggcagcggcaatgaactgttagaaggtggggaaatgggtggatggggcgggtcccccagagtctggggtgtcaggggtgtctgggtggggttgtctggcagttagttggatgtctgagcctaagtggaggtcagcactgggctagggtttggggagctgttagtttaacaggactgggcagaagagactggaggtggaaaggtgagagaaggttctaaaaacagaactttggggcatccttctgcagggaaccagtagggaaaagaggagccagtgaagatcgagaaggaagagagccagaagactgcagaatggggtgggggactccaggccctggcagaatggtggggattggccaccaagaggtggtgattgggagtccacaggcactggtcagaggccacctgctgctcctgctcctttgcaagcctctcaggacttgcgaggctcagaatgaatggatctggaacagggcttgcgagcctcagaatgaatggatctggaacagggcctgcgaggctcagaatgaatggatctggaacagggcttggtaaactgccaaggcacctggggactcgggagctctggcagggtcagcagaggaaggcagaaggcagggctgtctcacggcgtccccatcactgatgtcctctgctctcccctggcctttccagggtgcctgcggcagttgctggactttctccaccactggggccctggagtctgcgatcgccatcgcaaccggaaagatgctgtccttggtaagaaatcagccacaggcgaccccctgcggaggacaccccatcctgatgtgggccaggcctgggcctttggtttccctggagcattggctaagggtgctgtttcaggtggacccagatgccccagccttgtggacatctggcatgagaatctcaattgatgcttttcccgggaaggatctgagtttattaaggaaccggcccaagggctcattcctagatggatctgggtggtccttagcttgacagcctggagccttcccggcggaggggttcagaaaggcggagcctgcctggtgggtagccaactaggagctacacccttcccagcagcctcagttgtcttcatgagggaagagccgggacctatgcatccatcccctcgcccacaagagacggatgatgcccctgaaggaactatcctagcccctgcctctgtggagaaaggagggacagtgcacagccggcctggtgatgccatgaggaccctgggttgtggacaggtgggggtagggtctctggctgggcctgtttcccccatcctatacaccgctgtgggaccccacactctgcatcgtatgggcacacctacggggcaggggtttggacccaacagcccttgccccctctcaccttccctggctgcccctgcttactgagcccctcccgacatgtgccagctgctgggctggcactgcaggacatacagcaactgtccctgcccttggggagtttataatttggtcaccttgacacagcactgacggggcctcagatgtggctcagccagggaggcttagcgcctcacgccaaagccttgacggcttctcagctggcaggtcactgggttgtgtccttcttccaggcggaacagcagctggtggactgcgcccaggacttcaataatcacggctgccaagggtacgtctctgaccagaaggggcccaaaacttcctcatttcccactgaccgcttcgacaggatccagtgtgtgctgggtctgccacagatataacccaccactgccctgggtgatggcaaaatggtctctgttgtacaggggtggtcacctcacatggccaggtctcatagccaggacagggcagagctggaatctgagtccaggcctctgtcctctctccactgtatcacctggctctccacagtgcggttggcctcacccgccaccaaggcctctgggagtgtggccaaaagaatttaatagagtgagcaacacaccattacacatcatcctccaaacccgagatccacacacagatacagggttggcctttagatgaactcactaaagtcccagcctcccaagctcattgcgccctgtgagggtgaggtggctgtgtgtaagggctgtaccttgcctggacctgctttcctggcccactgtaaagcaggttgccaggaatttgctgacatttctacagtgactctagccctcccttcatgcagtgctctgagacatttctgtggtctttgctcacctggcacatggtgtgcataaagccaggctcttggggtgccgtgcctcgactcccctccacctccctggggcacatccctctcccagaccccagcccctctgagctggctcttcctcctgcagggagccgtgctgcagccaagtcctggggacccaggggtgacgtcgtagcctgctctcagatccaccatcatgctcagtgtccccttacttttggtctgtttccactccacagcttagaaacccaacccataacaagagtctgacatttgggcactctggggtcccaccgtttttatttttttttatttatttatttatttatttatttattttttctttttttgagatggagtctcgctctgttgcccaggctggagtgcagtggcgcgatctcagctcactgcaagctccgcctcccgggttcaccccattctcctgcctcagcctcccagggagctgggattacaggcgtgcgccaccacacctggctaatttttgtatttttagtagagatgggggtttcaccatgttggccaggctagtctcgaacccctgacctcaggtgatccacccaccttggcctcccaaagtgctgggattacaggtgtgagccaccacatccagcctgtttttcaaaggagtctatttgctttggttcaggacagtacttccttttctcattcatacaacaaatatcacagagcacccgctgtgtgtaggccctggggatacagcgctcagcagaactggaagagcgggcattctggcaggctcagagagaccacagtcaaggctagactaggtcaggcggtgcggaatgctatggagagaaacagagaagggacggggattgctgggcagctgctgagtttttgtttattctgggaggccacatgatgtagaaaagacccacttttggaaccacttcccagctttagctgtgtggccctggccaggttattcagcctctttgcctcagccagtgacagcatccaccacacagggtcgacacgaggggtcagggagtcatgcctgggaagcacctgcccaggggctcggctgtggcgatgacagtgctctgggctgatgctgttgaccatggtgtggggctgtgcactcctgacagagcggctggccttaaggggtctctatcccactgaggcatgtttgggctggtccttggactccggtggcctcatctgagtttgctgagtcttatcccaaggctgggcctctcagagaccccctctgccactgggacatgcccaaccaagtccccagcctgccaggccagatatctcgccacgccagtccccgagggccccgcctctatcaggacagccccaggtgggctcacctgtgtgtacttcttgcaggggtctccccagccaggctttcgagtatatcctgtacaacaaggggatcatgggtgaagacacctacccctaccagggcaaggtaactccaacagcctccactctgtcttcttggcgtacagcatgcctagcttcactccctccccagccttggaagacatcccttctccccccacctccctcccgccggaattctcacaattgtctgttctctccaaattcttccttcccctcctccacccacctgagcccactgctctcaccagtccaggggcctctttatcattctcaccccatacccgctctgcggcaccatctctttccttcccgagccagacttctcaggacccctccttccccccacctgccccatcttcctggctcctctccctcctgccacgagcgccatcctctcgcctctgtccatgcagttggcctcttgtgccaaggaccctttgggggcccacccccacccctaccctatcaaggctgctgggcctcccaccatcacctccgcccagcctggccacagccaagtgccttgtctttccccaagacctgttgctcctcctttatttcccctcgtggtgatgagcagcactggcctccctcagaatttcccaggtgtccacagtcctgttgggccggtccccctctccaccccaccctgccgccagcctgctgaccaccacagacctcacatgactcccttggcccatctgtgtcgctgaccactcagaccggggcctccatccagacccctgagggtggcctcccccaggcctctcaaacccagctcagaccccacgcctgcctcgatcagaatgccgccgaggctccatgcggccttcgggagaaagcccagactccaactcagtctccctgtctcttttactctcccttctttttttttttttttttttttttttgagacggagtcttgctctgttgcccaggctggagtgcaatggcgcaatctcggctcactgcaacctccgcctcccgagttcaagcagttatctgcctcagcctcctgagtagctgggagtacaggcacccgccaccacgcccagctaactttttatatttttagtagagacagggtttcaccatcttggccagactggtattgaactcctggcctcgtgatctaccgcctcggcctcccaaagtgctgtgattacaggcgtgagccaccgtgcccggccaactctcccttcttaacctcacgcccaggcccagccacatgctggttcctaaatgccaggtcctaccctccctctagttctgtcccttgtcctgctgccttctctcctgccttgaaagggctgcgcttccctccttgtgaccttacccctgcacctgcctcttgccagcattgttttttgggctgagactgtccccactcccctgcctcacaggctctgactcggcctccacttctcagtgagtttcctcaggccgggtgaggcccctcctcaggctcccaccacacaccatgtgtgcccacctctgccaaagccagcacaggaccatctgctaccagaccctaagctccttgaggacaaggatgctttaattctctctgaaattatcccatcccccaggccctggcacatcttgttttgtttagtaaatgttattgaactgcgtggggaggctgagacttcgggtccataacctgtatttcatgccctttgcatcctcaacaggatggttattgcaagttccaacctggaaaggccatcggctttgtcaaggatgtagccaacatcacaatcgtgagtgccgatccccctctgggatggggaatgtgtcctgatgaggaggcctctctcatgctgtcggatagccagtgggcccagcaaggcagcccttctggcagcacatccctttgacgagttcatattatccctgggtctcagtcgctgtgatggtggcgaggcaggagatgggagggagagcgcaaactggcaggcaggccctctggttctgaactccagatccacacatgccttcattcttttggttctgttttcttgcttgtaaaatgcaagcaattgtccgcatcctgcagaagagggtatgagcacgtgcttgacacagcgtgtgtgaaactgaggagggtgagtgtgtgtcactcaggatgagccaggttctgttgcaataacaaccgtgcccaatctgcatggctgacaacagtcaaagggtgtgtggcactcctgcgcccatgcacagcttagggagggtggtgtgtgctccgtgtcattggcctcacgccaggactagagggaaagaaggtggtaaatgatgccctagctctaaagccaaaacaagccgcccagtcacagttgacctcaagtgaatagggaagtgtggtcttaccctgcttctcccagagagaactggaacgtgaatgaacgccttcgtgactgcagtgtgcatgcatgcaagtgtgggagggtgtgtgaggagtggaggaatatcgcttaggttgtgtgtgcgcccacgaatgtatgtacagttcacaaacgtgatgtctgtgtaatgacagcggctgccatttagttgaagcatgtgccaagctctcagcaataacatcttaacttgatggagtacttctaggtgctgtaccaaccctcaatacgcactatcccctctagacccgaactggccctaggagatgagtatccttattacctcatttgacaggtgaggaaacgggggctccaagtggttaagtaatgtgcccaaggccacagagctaggaaatagatgctggatttgaactaagaatgtgtcattccagaaccagggctcattgccttgacaacatacagcgcaaatcctgtactcaggatgtcaccctcttcagaatgttgctgctgtcactcaagctggctgctctgggccatgatatcccaaggacaggtgaatttgggcctcaaaggtatccctttgcatggtccccaggagagcctcattggtgacacctgcagggccctgacgaccaggccagaactagcattcagccctcttgggcaggcccatggggtggaaatggtgccacctgcagaagtcatcgcccctgtgctgggctggcctctgtgccctccatgtctcagatatgccctgacctgttgggctcacaaggccttgtccacataccaggaaggagggcactcccttgccaggcacctgtttgcttttcacagctgggtctctgtccacccctctagggaggcaggactgagggaggctgggcgccccgtccctcctgcacttgctttccttcagtagggccctggcctcagcacaggtaacttcccccctcatttcagctcccagaggtctcttggttagtgcacttgaacccagccacccccaacccagaagctccaaaaagtgccaatgcctgggacccaccctgcagatactgttgtagttggtctgaggcacagcctggacttggggtttttttaaggttctgcatggggttctacctgctgctgtcacctggtctctgcagctctgttccaaagctgcagcctccaggaagccaccctgacttccccccacctaccttcccccttggaggggacaggttctactcagaagtcacacagccctcggatgggtcttctcgtttccaccgccatctgggacctacccgtccatggtttataacccctgtgttctagcagcaaagctttgtagactctgggtttatgggtgtaggggtgagagctgctggcccaggagaggacctcagggaatggatgtgaatgactgaatgagtaggtccacgctgtaccccgtggtccctatctcagagggtgcagggtttcctaggagcagagttggggagaggaacgagagatggccagacagacccagccagagacaggaagggagagaggccgcaggggagctgcttctggccatccatgctgctctgggcctctagcccctagcttgaggcaaaaggctgtactgtgaaaggagtggggaggtgacaggccatgtgtttctgtctcggtcctgtttccacagtatgacgaggaagcgatggtggaggctgtggccctctacaaccctgtgagctttgcctttgaggtgactcaggacttcatgatgtatagaacgggcatctactccaggtgagtcagggtcccaggagccaggagggacagtggggaggggcttggtgggcctcctcacaccccactcgtgggacttgggctcgtggcccagactcctgtgtgtcagacccttcatgacacctgccaggtgctgggcgttttgcacatccctcagttaatcctcacacagccccaagggccaggagccatggcctcttctcacagcaaaggagaggtggtcagaagggatacgacagacacaggccacctggctagtgagagctagggccaaaatttgagagctttgtgctccttaacagaagagttgcctccagtttaaaaaaaacccatgttcaggccaggcgtggtggctcatgcctgtactcccagcactttgggaggccgaggcaggtggatcacttgaggccaggagttcaagaccagcctggccaacatggcgaaaccccatctctactaaaaatacaaaaaaaaaaaaaaagccagcgtggtggtgcatgcctataatcccagctactcgggaggctgagacacaagaatggcttgaacctaggaggtggaagtagcactaagccaagatcgtgccactgcactccaaccttggtgacagagcaaagctctgtctcagaaaaaaaaaaaaaatacccatgtttaaagatttgaagacgtaaaatagggagaagagtagctgccctcacacactaggatcctgtgctggaggagtcaccccaggcttcttcagaaaaaccaagctttagcctctttactatggggtttctctcacccacaccttttcgcctgcctggtttgcagcctcatttccctcccttcatcagttgctgcccgttaacgtcactcactaatgtcactcacgtctgtgctctcctctccctccctgaggctctgccctggtcaccattgtccttggaccccctaaccccccacacactgttccagcttccactgggagctgtctgccttctgaaacactcctcttgccaacgccaacctttgaatacaccagtgtccctgctttcccagggtcctaccctgagggggaccctcatgatctggtcctccctctttttccacactcatctgccatcaaacccgtccccgccgttccaccctgcagcccccaccccagccacgcagaagggttcgcagttccatgggcgttccccgcctccacagggagccttccctgacccaccctgcccaccctcccccccccccccgctgggttggatcccccccacctcctgggggctctgtcgccctcccactgtcagagccctcaggccactgtagagaagcagcctctttgccaacctgctccctgccaaacagggcttccaagggacagttatgcatgctgcctggatcccggcacctggccctggcgcgagcctatggcccacttacacatcagctgaattcacacctgaccactgcagtttgttctcttgaatttcttggaatttccttatggaggctagttcacttttgtaaacagaaaaagttgtatttttgccataggtataaagtaatatttaataaatgcagtggcaacaaagcaaagctgtgttaaagtctgccagacactgttgcctacagaaggtgcagcaggaaggtggctctctccttgccaggaaagagggagtagaaagtgtcaggggtgagacacgggccagcaccatatggagattctcctgacagaagcagaagaaccaaaagaactgaaagggccgggtgcggtggctcacacctgcaatcccagcactttgggaggccgaggtgggtggatcacctgaggtcaggagctcgagaccaacctagccaacatgatgaaaccctgtctctacccaaaatacaaaaattagctgggtgtggtggtgcacgcctgtaatcaggctactcgggagtctgaggcaggagaatcgtttgaaccctggaggtgaaggttgcagtgagcagagattgcaccattgcactccagcctgggcaacagagtgagactccgtctcaaaagaaaaaaagaactgaaaggagttctctcacggagactaaatgtgattacatcaccaccttacatgcctccctggtccgctgtggggaacattgctctaaagcgctcaaagaggcgttgttggatgggactgtcattgcttttatccttcccatatgatcacctctttttgaattttgttttccagtacttcctgccataaaactccagataaagtaaaccatgcagtactggctgttgggtatggagaaaaaaatgggatcccttactggatcgtgaaaaactcttggggtccccagtggggaatgaacgggtaagcagctcccaggtcccacttctgggagggggatgttgctcaggcctggaggccctgggggcatcacttccacctcagagttacggcttccacagacgagctggtcagccaagccctaggccaggccagggggaaagggagcatgagaatgtagcctccacatttccaagcccccatttgcagccctcacagggccccaggtctttaggacgctgcagggagagcaggaggccagctggctcagaaggactgctaggaaaacagctcagaacttggaactctgctggcacgaaatcagtgtctgggagggtccgtctttgagaaatcaaagcaacaaatgtacccctgatcactgacagcccctccttccgggagaaaaggctggcatggggcggcctgggtgtatatgctgctgtgcctttgtcctgtcctcccagattccatgtccttgtctgaaaaggagagctttcctgttccctcgggctcctggtgataaaatagctgtgtgagggcccggccagggctaagagggggccctcggtaaattttcgggagaagtgggatatggatcattcatttggcagctaaggagagggaagaatgaattcttcacaaagtcaggtccgtgatttgccggtgatcaaataagccgaatgctactgttttatgaataaatttagagggtctcacccctgaagtcagctcttggtgagcagcaaaacattctagaaaggcctgtggtggggagaccgccggccgggcctcagctcctctttctgcccaggtacttcctcatcgagcgcggaaagaacatgtgtggcctggctgcctgcgcctcctaccccatccctctggtgtgagccgtggcagccgcagcgcagactggcggagaaggagaggaacgggcagcctgggcctgggtggaaatcctgccctggaggaagttgtggggagatccactgggacccccaacattctgccctcacctctgtgcccagcctggaaacctacagacaaggaggagttccaccatgagctcacccgtgtctatgacgcaaagatcaccagccatgtgccttagtgtccttcttaacagactcaaaccacatggaccacgaatattctttctgtccagaagggctactttccacatatagagctccagggactgtcttttctgtattcgctgttcaataaacattgagtgagcacctccccagatggagcatgctggtcctgggccatgactcaaaccaggtctgtcctcgccactcagtctcccaggagggaggcatcagggggtgtccaggctctggctgggaggatggtgggggtgctggcggtattatccaccagatggggtatccaggatgaagagcaggcttaatttgagatcttgactatttgtcccaaacctgagtggagaggtggggaggaaggagaaaaacgggccaagctgcggcagaggcaggattcaaacccacaatgtcagcccagaagcctgtacttctctgtgtggcctccccagtctcagctgcctactcctactcagactctgccccccacctccacatgagactgcccaccccttcctcaccaaccccttatttatttcaaacgtgcccagatgctcctgtcgtttccacaccatcccttcccttatcttgccttttgagaaatcttgatctctgtttagagggcggccatgaagttgctgctgcttcctgaagcctccgggctctgggatgtctgtagaacaagctggagtccaccagctctttgtcctatggctcacagactttcttaatgataaaagctgtcatcttatttgggcttcctgaaaagctaaaggcttgagaatatttgaaaaatatatatgttcatgataaggcttatttagataatgcaaatatagtttaatttattagaaaattctagtaacataagaccacaactgtataagacaaaaaacaatcaccttgctaggcatggtggctcacgcctataatcccagcactttgggaggccgaggcaggtggatcacctgaggtcaggagtttgagactagcctggccaacatggtgaaaccccgtctctaataaaaatacaaaaaaaaaaatttagccaggagtggtagtgcacacctgtagtcccagctactcgggagggtgaggcaagagaatcgcttaagcctgggagatggaggttgcagtgagctgagatcatgccactgcactccagcctcaaaaaaaaaataataataataatagacttcattggatggaattctattctagatttaaaaaaaaactaacatgaaatgaaagcataatttctttttctttctttttttttttttttttttagatgtagtctcactctgtcacccaggctggagtgcagtggtgtgatctcagctcactgcaacctccacctccccagttcaagcgattctcctgcctcagcctcctgaatagctgggattacaggcatgcaccaccactcctggctaatttatgtatttttagtagagatggggtctcaccatgttggtcaagctggtctcgaactcctgacctcaagtgatcccaaagtgctgggattacaggagtgtgagcaaccgcacccagcctgaaagcataatttctgaatttgacaaagattctcaaatcaatggtcagttgtataaaaggattcccattgaagtcagtggtataaaaggattcccattgaagatacatggcaaataagtctaagggtaccattcttgcttacatctatctggaagatctggctgctgtgataaataaacccaattaatatttgcagacagcatgataatgtggctaaaaacattcaggagaatcaacaaaacttagaactaatgaaagagttctgaaagtggctggataccagaaaaaaaaatcaaaaactcagaaaaaatacactattttttgttactattgcaactttactattgcaacaaaaccagcagctaggaataaccaccaaaaagtcttatatgaagaaaattactaaattaataacactataaaggaagacttagataaatggagagccaccatattcttttgttgttgttgttgagacagagtctcacactgttgcccgggctggagtgcaatggcatgatcttggctcactgcaacctccgcctcccgggttcacgtgattctcctgcctcagccacccgagtagctgggattacaggtgcccaccaccacacctggctagtgttttgtatttttagtagagacgaggtttcactatgttggcagattggtctcaaactcctgacctcatgatccacctgcctcgacctcccaaggtgctgggatgacatgcatgagccaccatgcccggccgaggcacaccatattcttgaatggaaagattagcataaataagttgattattgccagaaataaaagtacagatggtatatttccaactaaaatcccaataaaattctgttatcctttttatctgggggaaaaaaggccaaggtagttttataaatgagcaatgagggtggatttttttcacatattaaaatttacaaaatgttaacccttaaaacagtgtgccaattaagaatagattactcactcaggtctaggaagtaagaattcgatacatccgtcacagacgagtccattttcaccattcaattaaaggtgctagaagctgggtgcggtggctcacgcctgtaatcccagcactttgggaggctaaggcagatggatcacgaggtcaggagttcaagaccagcctggccaacatagtgaaatcctgtctctactagaaatacaaaaattagccgggcatggtggcggatgcctataatcccagctactcgagaggctgaggcaggagaatcacttgaacccggcaggcagaggttgcagtgagtggagatcgcacccctgcactccaacctgggtgacagagcgagactccgtctcaaaaaaaaaatagtgctagaaattgaacagtaggttggaaaaacaatgtaacctaaatcctcacccagctctatattgtttttaaagtgaacattttcttttctaacgggtttagatatagaatgactgtggagacagaggagaattcttgcacacccacacccagatctctctgcgatgaatgtagtagtttgatacaaatgtcacaattaatgatccaatatagaacattattaaccacattccaattaaatactcatttaaagggagggtcctgggtgaggttccaaagaaattcaaattaccacaaaaatcaaataactgttttcaaaattagcctcccctgagggatttaggtgctccgcagggattgtgggcttgggctggaacacagacctgagactttgaagcagagttctcctttccataagagccccgaatgtctcaaacccagacaatgatgagagtcttttattataaaaaggcctgcaggcctggtgtggtggctcacggcttataatcccagcactttgggaggccaaggtgggcagatcacctgaggtcaggagttcgagaccagcatggtgaaaccctgtctctactaaaaacacaaaaaaattaccttggcgtggtggcacgcacctgtagtcccagctacttgggaggctgaggcaggagaatcgcttgaacccgggaggcagaggttgcagtgagccgagatcgtgccactgcactccagcctggcaagagagcgagactccatctcaaaaaaaagagggggagggggagggggagggggcgggggggggactttcaggggccaattccctccttttcagccatttaccaaacacctgcagagtatccactgtgtgcagtcctctcctgtgccaggcaccagggagcacacaggatgtttataacatccagtgttggcaggactgttgtgaaacaagcagcatggcctgtgccttggtgctgtttggatttaaagagatcggcagacatggctacatccaactgagataagtaaatttcaaatgcacttgaaccctaaggatgctacagagcctggtacacagcaggtactgcctaattgatctcagtcatcacccctgcccctactccatgacaggccccgtgcggacctctagcaatctcaggcccatggactatgtctttaacactaaggtgctcctgcacttagggaaaagatagcagagttttaaaaaaacaaaaaacagttaaagtccaaaggttaaaaacaaagacatcacaagaaaagaaaactacagagcaatgttccttatcaatacagatgtgaaaatcctcaataaaatactagcagaccaaatccggcaatatataaaaagaattatataccatctctactaaaaatacaaaagttatttaccatctctactaaaaatacaaaaattagctagccgtggtggtgtgcacctgtaatcccagctgctccagaggctgaggcaggagaactgcttgaacccgggaggtggaggctgcagtgagccaagattgtgccactgcactccagcctgggtaaaaaaaaaaaaaaaaaaaaaaaaaagtattactatatgaacccagtaattccactgctaagagaattgaaaacatgtacacacagaaacttgtacatgaatattcctaacaacattatatataattgccaaaatggggaaacaacccagatgtctgtcaactgacagataaaatatgatacatccatacaaagaaacatccagcctaagaaggaagtgctgacacacactacaccatggatgaacgttggaaacatcaggccaagtgaaagaagccagacgcaaaagactacacattgtgtaattctgtctatatgagccaggcacagtgggctcacacctgtaatcacagcacttttggaggccaagacaggagaagttcttgaggccaggagttgaagaccgtcctgggcaacatggcaaaacttcatctctacaaaaaaatactaaacaaacaaaaaattagccgggcatgatagcagagcctgtagtcccagctactcaggagactgagaggtgggaggatcacttgagcccaggaggtcaaggctccagtgagccatgattgcatcattgcacttcagcctgagtgaagagcaatactgtctcaaaaaaaagaaaagaaaagaaagaaaaaaaaaaaggccaggcaaggtggctcacgcctgtaatcccagcactttgggaggccgaggtgggtggatcacaaggtcaggagatcgagaccatcctaacacggtgaaaccccatctctactaaaaaatacaaaaaaattagccgggcacggtggcaggcgcctgtagtcccagctactccggaggctgaggcaggagaatggcaggaacccgggaggcggagtttgcagtgagccgagatcacgccactgcactccagcctggggacagagcaagactccatctcaaaaaaaaataaaataaaataaaaataaaaaaaagaaaacgaaaaaaagcagaagcctgtgtactcaagactttaaaatttcaagacatgttaattgtgggggctcagggcatgtccctaccatggtcattattagtgtgagtgaactaagcatctcctcccaaaaccatagtgtccgtgacaggaagcccagctcctgccagaatatccagtggaaagaatgctaatggaacacaactttttggaagcagacacacctggattccaatctcagttctcccttgaattttctgtgtgaccttggcggtagtgggggtgttagttaccctctctgagcctccatttcattgtctacaaattgatataatcatattttcttcgtgatttttaaaagttttttaatttttgtagagatggggtttcactatgttgcccaggctggtctcaagctcctggactcaagcgatcataccgcctcagcctcccaaagtgctgggatcacaggcattgagccaccgcgcttggccgccttcacgattttgtggacagaattgagatgatttatggaaatactcagcgtcacatctggctcttagtaagcactcataaaagagagttatctttcactcatttgtccaataatcatgtattaaactgcgacacatgcccagccctgccctaggaggcagaggcggcacacagcaggggcaagtcaggtctactagctgcacctacaaactcatgagcttcctcacccaagtgagtcttttcactttgccctggagacagccaagagccatcctgccagccaggtttcatgtgggactgttgtaaaagttccatctgcatagatcaagctcttattcattaagcacctagtgcaggccaggctctgttctggcactccagtcatctgacttcctttagtcctccctcctggtctatgaggcaagatagtcccatttatagaagaggaagctgaggctcagtgagatgatgtggcttgcccatggttacaagccataggagaggaacctggggtggtctgggccctagccagcacatgctccacccaaccagacgcctgtgacaagggctggattcctcagtacgggaaccttctctttggtacaattgctggtggcctctgggagtgattcaggggcgtgtgcaaaaatgtccactcctgcagagccgggtgcaagttgatttgcccccttttgtgaattcagccactactggagggcacagaagctaccctgctggggaccaggctgaagaacttcagcagtcctaagatctgggaagattaagccccttctcctacttagatatatgtgtgtgaataaaatgtagaataaatgtatattgcttgaaatgtcacaaatgggccaggcatggtggctcatgcctgtaatcccagcactttgggaggccgaggcaggtgaatcacctgaggttgggagttcgagaccagcctgagcaacatggagaaaccccgtctctactacaaatacaaaattagccgggcatggtggcgcatgcctgtagtcccagctacttgggaggctgaggctggagaatcgcttgaacccgggaggtggagtttgcggtgagtcgagatctcaccattgcactccagcttaggcaacaagagcaaaactccatctcaaaaaaaaaagagaaaaaaaagaaatgccacaaatgtacatgcatgcaaaaattaatagcttccttctaggttgtcaaattctagctaagatcactgaagaagaatttaggctgggagtagccttgttctgggtgtgtggtgaccaaccagcccgatttgcctgggactgagagtacttctgggacctggaacttttagtgctattaaaactgcaaaaaacctcaggaacatggccaggcagggctggctccaagggcatatgaccagtgaagtcatacagcactggggttttaatgctctgccgtcatcatcttaacatgcataattattttctctttgaacatgtgtttttgtaagtgagtccaaggggacaactggagcacatgccagggggcgtggagccttggctgacacgtgttaccacctcccaccaccttcctgcctctcttggccagtttctgagccactcacttctctaacacatggcagaagcctgaatgagagatcgggaggatttggagccaggcacgcacgcttcatagcagctcaggatggggcatggtggtggctacccctgacccaggctggcagctctatggcacgccaggttcagtgggagtgaacctctcacccgcccgatcgagatataaaacacgttccagcacagaggctgcaatccctgtgggccacctgtctgcatgagtaggaacagcaggtccatggaagggggagactgacttcctgccccggctaggtccaggtatttgtttggaggctgatgggccatgtgtacatggagttgcacagcaggaccccagatgcctatgacagcctgtacctgccaggcaattctccctatgtccaagggagtacaatattaaataacacatggaaaacactatgagaggtcaagagagaggccacaggagaaaagaaaatatgttgtattttctcatacctttaatggcactggtttcctgctttgttttttgtttttttgagacagagtcttgctctgttgcccaagctgcagtgcagtagcgtgatctcagctcactgcaacctccaccttccaggttcaagtgattcttatgcctcagcctccccagtagcggggattacagacgcacaccatcatgcctggctaatttctgtatttttagtagagacggagttttgccacattggccaggctggtcttcaacacccacctcagcctcccaaagtgctgggattacaggcatgagccactgtgcccagcctggtttcctgctttttgaacaaggggccccgcattttcactttgatgcagccagctgtaccaacagaaagtggtcaccctatttgggtccacctgccttgtgctctggtgtacataaagccttcatctgctcttggggtcactagccctgctcttggtggccacctgtgccagacccctcatccagaacatgtgctaggtggaggcccagaaactgattcaggaatcctcactggcttccagagcagaaggcattcacagctccagcaggagccatgccatcattcgtgggaattaatcatcacccgaacacaaagaaggtacaaaatggtggtggcctctggttgcctgggttcaaattccagctcagccattcactttatcaccatgagcaaaaatcaataaaaacctactccagtgtccttgctgtattatgctggactatgctatttcacatttattacttccagcccttacaatgacctataaggtaggatttattaatatcctcattttacaggtgggagaatgattcactttcccaaggccctacaactaacgcaagagagctgggattcaaacccaggtctaactcctaaaatctttactgctcttcctccttacttcccaactcctgctgtgagcctcaaaaatggaggtgagactaacaccttcctcacaggattacagcatctacttgacataatgggtgtatgacctgaaattttaaggtcaaagtattttttagagatgtagcattgttctaaggcttccaaataaacagatcattacgtttcccacggtagagtgacattaggataaaaccccagctcacaagcaccactacaatgaaccaggaagaccccaccgtcagcaataaaccagtctccattacatgtaattacacaaaaaaccaagaggccaaattcaagtcattcgttatgaaatgcttttttctttacaaagtaaacatgcatattgactcttatgggtacacatatattcttcattacagaaactcactgaactaatgaatgaaatcagcaatcttactcttaacttcctgttacaacacaactcctgaggtttttcccctagcaacatcaagaaatgccaagctcatctcaaaagttaagctgaatggaaggtttacctggttcccaccagcagtcacttaattcagttacgggttttgaactcaggatgaaatataaacttttttaaacagacaatcattatacatgtttatggggtacaatgtgatgtttcgatatatgtacgcattgcagaaagattaatcaaacttacatatccaacacctcacctacttacccttttttgtggtgaaaatgtttaaaatctagtcttctggctattttgaaatgtatggtcaccatactgtgcaacagatctctaaaatgtctgaaaccaacatctttgaccaatatctccctttccctatatctccccctccgacctctgctaatcaacattctactctctgcttctatgagttcaactttttaaaattccacgtataagtgaagatcatgcggtacttgttttctgtgtctggcttatttcacttagcataaaatccttcaggttcatccctgttatcacaatggcaggatttcctttttaaaggttgtatagcattccactgtgtatatatacattttctttagtaattgttcctagcatccaaacagcactcagagtttaggtaaacacaagagtttcagcatgaggctgtattagcctggactgacttggagagcggggccaaaggcaacttgcatgaaggaccacagggcctcctgggaaacagcaaccatgggggacagagga

SEQ ID NO: 1154 - DNA, 1501 bp, Homo sapiens
tccacgctcgtgccgcccccccccgcgctcccagttgacgctctgggccgccacctccgcggaccctgagcgcaagagccaagccgccagcgctgcgatgtgggccacgctgccgctgctctgcgccggggcctggctcctgggagtccccgtctgcggtgccgccgaactgtgcgtgaactccttagagaagtttcacttcaagtcatggatgtctaagcaccgtaagacctacagtacggaggagtaccaccacaggctgcagacgtttgccagcaactggaggaagataaacgcccacaacaatgggaaccacacatttaaaatggcactgaaccaattttcagacatgagctttgctgaaataaaacacaagtatctctggtcagagcctcagaattgctcagccaccaaaagtaactaccttcgaggtactggtccctacccaccttccgtggactggcggaaaaaaggaaattttgtctcacctgtgaaaaatcagggtgcctgcggcagttgctggactttctccaccactggggccctggagtctgcgatcgccatcgcaaccggaaagatgctgtccttggcggaacagcagctggtggactgcgcccaggacttcaataatcacggctgccaagggggtctccccagccaggctttcgagtatatcctgtacaacaaggggatcatgggtgaagacacctacccctaccagggcaaggatggttattgcaagttccaacctggaaaggccatcggctttgtcaaggatgtagccaacatcacaatctatgacgaggaagcgatggtggaggctgtggccctctacaaccctgtgagctttgcctttgaggtgactcaggacttcatgatgtatagaacgggcatctactccagtacttcctgccataaaactccagataaagtaaaccatgcagtactggctgttgggtatggagaaaaaaatgggatcccttactggatcgtgaaaaactcttggggtccccagtggggaatgaacgggtacttcctcatcgagcgcggaaagaacatgtgtggcctggctgcctgcgcctcctaccccatccctctggtgtgagccgtggcagccgcagcgcagactggcggagaaggagaggaacgggcagcctgggcctgggtggaaatcctgccctggaggaagttgtggggagatccactgggacccccaacattctgccctcacctctgtgcccagcctggaaacctacagacaaggaggagttccaccatgagctcacccgtgtctatgacgcaaagatcaccagccatgtgccttagtgtccttcttaacagactcaaaccacatggaccacgaatattctttctgtccagaagggctactttccacatatagagctccagggactgtcttttctgtattcgctgttcaataaacattgagtgagcacctccccagatggagcatgctggtcctgggccatgactcaaacca

SEQ ID NO: 1155 - protein, 331 aa, Homo sapiens
MWATLPLLCAGAWLLGVPVCGAAELCVNSLEKFHFKSWMSKHRKTYSTEEYHHRLQTFNWRKINAHNNGNHTFKMALNQFSDMSFAEIKHKYLWSEPQNCSATKSNYLRGTGPYPPSVDWRKKGNFVSPVKNQGACGSCWTFSTTGALESAIAIATGKMLSLAEQQLVDCAQDFNNHGCQGGLPSQAFEYILYNKGIMGEDTYPYQGKDGYCKFQPGKAIGFVKDVANITIYDEEAMVEAVYNPVSFAFEVTQDFMMYRTGIYSSTSCHKTPDKVNHAVLAVGYGEKNGIPYWIVKNSWGPQWGMNGYFLIERGKNMCGLAACASYPIPLV

SEQ ID NO: 1156 - DNA, 96314 bp, Mus musculus
  misc_feature (1)...(96314): n = A,T,C or G
aattctgtacactttgaaatagtttacagcaaaggtatagggatagaattcaaaactatatatatatacatacatacatatacacatacccttttgtaaaatatgtatgtatgtatatatatatatatatatatatatatatatatatatatatatatacacacatacatatacacatacccttttgtaaaacttagaagctgactggctcacctttgatcccagcacttttagaaggcagaagcagtgagtctctgagttccggagcagcctaggctacacaatgagaccttgtctaaaacaaacaaacaaaaacaaaaggtatttagaacttccgagattagctgctaaaggcacttggtaccaagcctgatggcctgagttcaatctcaggacactttgggaaaacagaatcggctcctccacgtcaatgtttgacctccacacccgtgctgtggtacctgggtgcggttcccggtcaggaggccaggaaaaccaggttcttggggaggttcctgtaaaggatttattacaacaagaattcctcattccttttcaatactgtatttactgtgctattcaataaatggatgggcgttgggattaatattagatcatatgactgtaagattagaattggagatatcagaaatctgaataagggctggagagatggctcagtggttaagagcactgactgctcctccagagatcctgagttcaattcccagcaaccacatggtggctcacaaaccatccataacgaaatctgatgcgctcttctggagtatctgaggacagctacagtgtacttacatataataaataaatctttttttaaaaaatctgaataaatcaagcaccttctctgtaaatgagagcaaccagtagttggtcttcttgtatttgttatggccataccttatctcaaatactaattaacagccgggctaggtggcgtacgcctttaatcccagcactctggaggcagaggcaggcagatttctgagttcgaggccagcctggtctacagagtgagttccaggacagccagggctacacagagaaaccctgtctcaaaaaaacaaaaaaaaaaaaacaaaaacaaaaacaaaaacaaaaaacaaagctgcagagatggctcagtggttaagaacagtcttccctcccagagatcttggattcgattctcagcatgcacatggtgcctcaccacctcatgtgactatttccgggcattcgattccctcttctggcctctgtagccaccaggcccatgtgtggtacaccaggcaagcaaaatacctctggacgcaagcttttaaaaaattaaaattgtgggctggtgagatggctcagtgggtaagagcacccgactgctcttccaaaggtcaggagttcaaatcccagcaaccacatggtggctcacaaccatccgtaacaagatctgacgtcctcttctggagtgtctgaagacagctacagtgtacttacatataataaataaataaatctttaaaaaaaaaaaaaaagaatctcataccattccatttaaaaaaaaaaaaattaaaattgtaaaaaatggctgagtacttacctaatatgtgcgaggtcctgggtttggttctcagaactagggagggtgggtatttgtctgacctacattatgtagctgtgttaaaacatcatggccaaaggcaacttgtacataaaatagtttatttggcttgcaggtcacagtccagcagcagcagccaaggcaggaatctggaggcaggcactgacgcagagccatagatgaattctcctactgccgtgctcccatgacctgcttagcttggtttatttatctatctatttatttataccacccaggactcagggctggcaacacccgcagtgagctgggccctcccacatcagtcattattcaagaaaatgcccccaaagactcgctagtaggccaacctgataggggcattttctaaatcgacgttccctcttttcagatgactctagtttgtattcagttgataaacaaattaactagcacagagttctgcggctgtgattaaacactggccacaagcaatttagagaggaaagtgtctattttatacctccaggtcgtagctatcgttgagggacgtcaggacaggaattcatggccggtaccgttgaaggattttgctttttggctcactcaggctcatacttaactggctttcttttcttttacttttaaatatttatttgtttgtttgtttgtagtcagggtatcactgcatagccctggctagcctgatactatttagaccaggctggcctcctaaaactcacaagatatatatgtgtgtgtgtgtgtgtgtgtgtgtgtgtgtgtgtgtgtgtgtgtgtaaaaatataaatatgtgtgtgtgtgtgtgtgtgtgtgtgtgtatggggtaaaaagcatgtgccaccatacctggcttagctaactttctttcccagctcagaaccatccacccaaggaatggtgccctccatcacagtaggccaggccctcctacagcaattaataatcaatacactgtgtcacaggcatgttcactgatctagacaattcctcagctgaggcttctctcagaccatgtttggctgtgtcgagaagacaagaacactgggcttctcagaccttatgtctgatatgttatccctgggacttggggcctggtatggccagaccttctgatctttcaagaacacctggaaatgcagattatgtcatcctctggttgtacgttgacaactatagaagttaaattacactcgagacactagtgggctaacatgccttgtgccaaatcaataactcgttgggccccatgtagttataacatttgatgtagacagaataccactgtgattattcagagactaggagagtcacacctgcaggggtggctgtaaactcagagagtggcataacctagggagcttccctgaagaagaaacagaaacatggggagagaccaaacgtaccagaaactaaccaaccggaaggagaaggagaggaggaggaggaggaacaaacaaggagctggagagatggctcagtggttaagagcactgagtgctcttccagaggtcctgagtttaattcccagcaaccacgtggtggctcacaaccatctataatgggtgtgtctgaagacattgagagtgtacttacattaaaacaaataaaactgggcgtggtggctttgttaggccgggtgtggtggcacacacctttaatcccagcactcaggaggcagaggcagtggatttctgagttcaaggccagcctggtctacaaagtgagttacaagacagccagggctacacagagaaaccctgtctcgagaaaaaaacaaaaacaaaaacaaaaaaataactctgtttttaacgaaaggaaagaaaccttaaagataacagctgaaagatacaaggaagcacatgctctcacacatgagaaaacaagaaaaaaaaaaatggggagacaattggagtagctgtttttgtcccgaagcaggcatccagtggggcctcgggtgctgtcagacagttcagactcctgaaaggacaaatgtgggtaaagctatcccagcagctcccactgtcatacgcacaagccggttcctgacacagggctatcaacttttactgatcgtttatttcaaaactttatcttttcaccaatttataactaaacactttgttcagttgcacaacttagccccgagaagacgtggagctcatgacttactatgccaggaagtgagaaagataagaaaagtccctgacacagcagaacttcccacatttttagctgacaagtgggtgaggggcctggcttggtctatttgaaattattaatttatatttgaggacacacacacatgcggctacttgcacgtagacactggtgggcagcttgtgggaattggtcctttccttccactctgtgggctctagggatcaaagttagtgcccccgtgtcactgagccatctttcctgctatcttaggggtttactgctgtaaacaaacaccgtgaccaaggcaactcttataaggacaacatctaattggggctggcttacaggttcagaggttcagtccgttattatcaaggtgggagcatgacagagcccaagggggcatgatgtagaaggagctgagagttctacatcttcatctgaaggcaaacaggagaggactgactttaggcagctaagacaagagtcttaaaagcccacagtcacagtgacactcctcctccaaggccacggccacacctactccgataaggccacacctcctaatagtgccactccctgggtcaagcaaattaagaccataccacacctgccctgtgcttgtttgttttgagcctctcattctacagctagggctggccttaaacttgcagtcttcctgctccagccttccaaggtgtgaatcatcatgactggtttatttatgtatatacgttttaagtaacttttaattttccattttgtatgtgtgcgcttgtgtgtgcgcacacgtgtatcggtgtgtggagtttagaagttgacatctggtgtcttattcagtcactcaccacctcctttttgttgtggtgagatcttttgaacctggagctcactgatttgggaagattgactggcctaaaggccttagggccctctgtgtgttccccaaaaccgggatgataagagtgctgctgtacccagatttttatctttttacagcatgatttctgagaattcaaattcaggaaataaatattcagcttgtagggattagaactttatgtcagataaaacaaggtacaagatgggttgataccataggaccagaaagacaaatagaaagattaaagccatatgtggctaatagaaccatgaatttatggggtcatgatttattgtagcaatggaaaacacagattaacattcctcggatctcagaaacaaatcatgaaataaagaatggttctgagagaaatattaaaaggtcttatcaagaacacccacagactgtccaggttgtacataagcaagacacacaactgcaaagagactggatagtaggaaaaaagaccggggaattaaatcatccggatacattgacctcaatggaaaccaggatgtgttacattgttacaatatgttacatggggaggaggttttgactttgtatccacaggagaccaaaagctgtatgttaagacctaggtaaaatattaaggcctagatataatgttaaggcctagctgttaactggctagctggtcagtttgtgctgttactaatattataaggtcacatatgtctctgctgttacaaagacattttcaaatgccaagattgattacgtattctgttatgttctgtgcccttggaagccagtcatgatagacgacattagacctgctttgtatgttacccacaataagcttggacccaaaccaaccccccagcagcatttcctgcccctttgtataagcttttatggtgtttgcttttgtaagctgcccctgggatggaccccaacataagagagatacctgaactagtataagaaactatttggaataaggcttccattttgagcagaaatcaagtacagtttaaattccggagacctccctgggaactgacaccctgctatggcagaaagagacatagacatgggtaaccaacatcttagttgacaagttaagacatgaatgttagacgagtcccatcctggttgacaagttaagacatgaatttgttagacaaggcaagtcctctgtcacagttgaataccccaaccaatggaaacaggataagtgaacatgaagacacattcctaaggaagtcccatatccctaaattctgattggtgaaataggttggcacagatgtttgtagatctcaggcttaaaaagccctataggatctcaactcaaggtcacagttcagctcttgagcctggaaggtggacctgatcgatcagtcttggggtgcggcattcattaagccacccctatttggctgagatcagtatcagcggtttgtgtggtgattcccagaccccatcacagtggctgccatcacgattgataaagattagatttgaacaggagagatctcctgaataaggagaggtgatagttcatcagacagcttggtcattcagtccaaactaacttataaagactagcaaatgcctttcatttggtcaagcatgaaaaaaaatgaaattaaaaaatcagatttttgaatgatatttactaaaggcaacttgccttactggcatgaaataaaagatgggttttcttaaaccatgtttcttgattcaatgttagaatgttagattgtagattgccgtgtgacccaggccaccttggacatcagcttttgagttttcactataaaggatatgtttgttgtttagtatcaaaaacaccgttaagagacttagaatattttaagtaaattcaaagggttattacaattccaacttgttttctaaatctctaagagttggagtgatttggaactaagataaaatatttgagcagagcagtgatagccatgcctttatccccaggagagacaggtggatcgctataagttagttgttttctaaatccaagagttacagtgaaccaggtggtggtggtgtaggcctttaatcccaccatccagggacaaaattcaaatatggaccctaatgagtatgtttgtacactagagaaatcacatatcatatttacagcttataaccctctacagggttactagaaatgcagctaatacccaatggggacagggacaaagagcagcttctgtgactgctgctaagctcctctctgtcatgcaactctgaccagtactgagccagatgataccctgattatgagtatcatatttattggtgacttagcaactggggacatgtcttcacaaagcaaaaaggagtccaccaacatttgcctgttgacttctaatgcaaatgctttccatatatggaaaataaatattctgtctttaagaaacaaatctggacattttactacgcggcgtggagaaccttatactcagtcggtgccaaccactctgtggtcataagggtgggtctgccaatgatggattggatctgtttgaaggtagagtcctttgaaggcttagctatggaaagggaggtattacagtgggactggtacctatgtgaattcttcatgaccaggatgtggtagcaaagggtctacaccttcctgcacagagaaaatagctcatatgcttatattcccgaccgtaaattgctcatccctccccagaaagaggcacctattgaactgtggggaccaatggaatgatcacaacatttggctaatgcgctatttagtgatgtttcatcaaccactgatgaaaccaaaacttatggaaagtggcagcctgtagaccgggggatggaatggccatcactgaggaaggaccacaaaatcagtgcagcactattgcctgtaagacaaaccactaggaaagcaaagggaagatgtctgtcttctctaattcatgtgcaatggtatagcagctatacggccatcaaaacggaaaaccactaactgatggataaatggcaaagatatctggtcctggttgttgggggacggagggacagaaatggaagcaggaaaacctaacaaacttagcaaagatatcaaattatgtgtagcccatacaggcaagagagtcaaaatgtccaaaaataatgaaacagtgtagaaacatcccctgtgtggaaatttactagaggacacatcaggtctagagatgtctatctagagtggcatgtaacccaggctagcctcttatttgtggaaatccttctgcctccccctatagagcattaatgattacaggtgaaagccaccacaccacagtggcttagaccaccaaagacagagctaaaatgtcatggacaaactggagatccaggtgagaagatgacaggagttcatttagaatccagtgaaggagttagtctgtcaataacctaatttaactacatgttctacctatcaaaacacactgtgagagtggacaaggcagtatacacctcccatcttagcatctaggaggcagaggcaggcaagttctctgtttcacatagaatctcagggcagccagagctgcataataaaggccctgttttatagaactaaaacaaccactgaaccatagtaagttcaaggacagccttgagatcctgttttttaaaaaaattcaaattttgggctgggcgtgatggtacacacctttaatcccagcacttgggagtcagaggcaggcaaatttgagttcaaggccagactggtctacagagtgagttccaggacagccagggctacgcagaaaaaccctgtctcgaaaaaccaaaaaaaaaaaaccaaaaaaaaaaacagctttatttaggatatttatttgtatattagtatatatgaccccgtgtgtgaatgcccacatgtgtgtatgtgcgccatggtgtacatgtggaggtcagagaatgatatctggtgtgtgtcctgctctgaggccgtttgtcctactgttctcctttgcataacccaggctacctggccccagagttcaggattcgcccatctcactgtaggagtgctgcgctgtgcaggttctgagagtactcactcccgcctccctctcacatcgtcgtgccccacccgtatccccaccccaaaccctctatcactaaaaacaactaccagcccagtcttcaggctatcttctagagttccaggccagctaaagatacacagtgaggccgggcgtggtggcgcacgcctttaatcccagcacttgggaggcagaggcaggcggatttctgagtttgaggccagcctggtctacaaagtgagttccaggacagccagagctacacagagaaaccctgtctcaaaaatccagaaaaaaaaaagatacacagtgagaagctgcctcagaaaaacaaacagaaagaaagaaggagagagagagagagagaagaaagaaaggaaagaaagaagaagaaagaaagaaagaaagaaagaaagaagaaagaaagaaagaaggaagaaagaaagaaagagaaggggatttaggggtgtggcccaatagtagagtacttgcctagaattaatgaggacctgagactcacccatagcattgcaaaaagtaagtgaaataaataaataaataaataaatgagataatgcctaaaataaatgaatattgttattgactacaactcattaaagctgggaaaatctcatgtatatttaagtcaacgtcaactaaagcagaggtgatgacccatggctatacttccagcattcaggaggcagtaggcggaagatcagaagttgccagagggaagggctactgttctcattaaaaatcagggcacttcaaaataacttggccatagctgagtcacacttagaattcctctgtaacctactacagtgcttcttcacctttgctttcactgaacctcggagctgggtccgggtctaggacttcagggtttctgggctggggcccagagtctgcatttccatgtttaagtctcgttggcctgtggaccacaccttgtgaatgttagaccacgtgctagggagagttttaggggctaggcttctaaggccagagcactgaggactgactggctggtttcctcttccctgctcagttcttttctggcagccgggacaggctgaaggcccctgtgaatggccagcccctgaacttcatcattgctcattcaggggtgccgccattccggaaggaaacacagttgtgggagatgcatagaccacagctgcttctgagtcacgtggcctacagaggctggacctccactcgcagcacagagcctcggggcggggcggagctgggggcgggtcctggcatagggtcctcaacaacccccggaggtgcagcggctggccagagcgcccactgcctaacggagagaccccatcgtggcgcgatcatgctccgggtccccctgtgtacgccgctcccgctcctggcactgctgcaactgctgggcgctgcgcacggcatctatgtaagtctccggtgccaccgcgcggggacgctccgccgctgggaagcgggcagaggccgaggaaagccgcggctctgcaaagtcgggatccgggttaccctcgatcacccgctcagagcaggcaggccgccgaggcgcaggcagtggtcgggcctcccgtaggaggcgggccggacgggcggggcgcgcgtccttcctggttgctggcgcgcgtgggttccgctgcggcggtcccgtgtgcacggacctgcttcccggtttgtgcagcgcggtcgggggctagctgaggtgcgcctgagtctttccagcttcggtttctggggagaggggtccaggctgcgcggggctgctagagggctccgcgggcagtggcgtggggcgcgatccttgcggagttcgggcttcatggaacgctccggaaggagaaaaaatggggtcaggagtggctcctgcagtggggtcacaggaatattcgctttcagagacttctcccttttcaaacatactgttcatgtttctcgctagccacctgctggctgcttttagtttgaggtgtgcatcgccttgtttgttggaagcctttttcttcttttagggtttggcggtgcgggaggagggtgggaagaggccaagtgctacaggcgaggtctgggtggcagggcagtggctgaggcgcgtgggacacgcacctggggaggtctgcaccgaacctgcgaaggggacagggcgtggtggaacggggctcctactcatttgcactttgagcgagtcaccttggggccctccagatggactgagtcgggtaagttcaagtacttggtagtagactttgaaccttgtagacttgtaaaaattacactcttggaaatggcacacgtttatctaaaaccagagttgaaacttgtttaagtttctggaaaacagttgctgaaaatgctttcgattaaggagaacgaaaatttagtgccggctgctccgtcagagcttgaggtcttgagaaccagtgggcagaggctccaacaggtaggggaaaggaacccatatatctggagtgtcaggatgggcaggaagagataaggatttatggaggtgtcaccagtctgatgtaagtcaccaggcaagaaattgaggtgccctgtgagagccgaaccctgagacgctgctttgtgatctccgcgggaattcttaattatgtagctatccctcttgagcagttagattagagccaagaaattccagccaactggctttcagttatttttgtttgtttgcatctgcaacgttaactctcaaacttcagacctagattaaaaattaaagccgggtggtggtggtacacacctttaatcccagcactcgggaggcagaggcaggcagatttctgagttcgaggccagcctggtctacagagtgagttccaggacagcnnnnnnnnnnnnnnnnnnnnnnnnnnnnnnnnnnnnnnnnnnnnnnnnnnnnnnnnnnnnnnnnnnnnnnnnnnnnnnnnnnnnnnnnnnnnnnnnnnnnnnnnnnnnnnnnnnnnnnnnnnnnnnnnnnnnnnnnnnnnnnnnnnnnnnnnnnnnnnnnnnnnnnnnnnnnnnnnnnnnnnnnnnnnnnnnnnnnnnnnnnnnnnnnnnnnnnnnnnnnnnnnnnnnnnnnnnnnnnnnnnnnnnnnnnnnnnnnnnnccacctcctcctcctctccctcctccttctgttgttgttgttgttagatttatttatttttctatgtgactatactgtagctatcttcagacacaccagaagaggacattgggtcccattacagatggttgtgagccaccatgtgggtgctgggaattaaactcaggacctctgaaagaacagtccatatttttagctgataagccatctctccagtcccctcctgccaaaccgattgcacattaacaagcaatacacttgtatgaagatatgtctctccgttttgggctagagctgtaattactttaagagaagtctattcttttgagtttggtttttttttttgtttttttttttaaagatttatttatttattatatgtaagtacactgtagctgtcttcagacactccagaagagggagtcagatctcattaaggatggttgtgagccaccatgtggttgctgggatttgaactccggaccttcggaagagcagtcgggtgctcttacccactgagccatctcaccagccccttttgtttttaatgagaagttctcatgaaccctggctggcctcaaacttggtatgtaatcaaacatagccttggacttttgacgattctgcctttacctcctgggggctgggaggacctgggtgcaccaccatgccctgtttctgtggtgctgagagtggaacccgggctttgttcatgctaggtcctctacaaattgagctacatccccaggcccagaaatcagaatcttacgttgccgtttgcaatctgcagtcaactcagattttgttgtttttggaaaactgtattatccacgcactggaagtgtgaaagtgaggttttactgttacatgtttacatgtaatgacatttgcaacggtgctttgctgttgttacgaaaacagttttgactcatgagagactttccccagacgatatgctaacatctgatcacttagaataataactttcctattattaaaaaaaaagaaagaaagaaaacagactggggacgggggccactcgagaagcagaagcgggagtctcagccggggctacacagagaaaccctgtctcaaaaaaaagggaggggggagaatgagaatgaatgaatgaatgaatgaatattagaatatggttcatgcccgttgtggggaatctttaaccgtatgaaacactgttaagccaacagtaggaactgaggctggagatgcggtttggttggtagaatgcctgctggtgtgcatgaaaccctcacataaaccaactgcatggtagagcatgcctgtaatccccgcacctgttgggtggaggcaggaggattggaagttcagggtatccttgaccacactgtgaattcaagggcagcttggactacgtgagacctgacccaaaaggtcatgtatcacgtcgtgagtgccgtgagtgcggtgcgttttaacagcagagcctggcggctcactggtgtttgagtggcttggatttgaggcaggttggagctgtggccgcggtccgtgggctttggttgagtgggaatgagaatgctctgctgatctatctatcccataaagctgacaccagttcctggttgcaggcggagctgacccggaagtctctcactggccactgtcctttctcaggaagtcacttgccccccagagtccactggcactgagccttggggggggactcttcaggagctgagagaatgacgctcttcaggcagttgtcgctgggctccaaggctgccctggctgcagccacggtcttcctgtccatgatcctctcccgctcctttctggctgagacccttgagctccaggcctggcgctggctgttccgcctgcagctgatcctgtttgtaaactcgatcatgctcattggctcctcgtacatctggcggagcaccgtgagcaacctcagccattcccctgccgtggaatctacctgtttccagatttggaagctggctgtcatggcgtttctggccctggcacattccagcttcttcaccatgctcttcttggtggccgaggaaccctacatgttttccttaacagcctactcctgcctgggtgcctacatcatcatggtcttcttcctttgtatcttgaatgccatggagcaggcctaccagttcttagcctggcgcagcggtagggtggtgggcagcctggacaagacaaggcacctggtgctcaggcctgcgctggcagtggccgtgacggcggtgctcagtaccattggccttctgaatgctgcccagcccccagtggtgaaaaccgtggaggtgcccatccatcagctgcccgcctccatggacaacctcaagattgtgctcctttctgacattcacttggggcccacagtgggcaggaccaagatggagatgtttgtgaggatggtgaacaggctagaaccagacatcacagtgatcgtgggcgacctctccgactcggaagcctctgtcctgcggacggcagtggctcctttgggccagctccattcccgccttggcacctacttcgtcacgggtaatcacgagtactatacatcggacgtcagcaactggttcacactgctggaatccttgcacgtccggcccctacataatgagaatgtaaagatttctgcccccggggacccggacagtgcggggagagatagagaatgggtctgcttagccggcgtggatgacatagaagcagacatccttcactactctgggcatggcatggaccttgacaaggctctggagggctgcagcccagacgatgccaccatcttactggctcatcagcctctggctgccaagagagccctccaggctcggccagatataaacttgatcctttctggacacactcacgcagggcagatcttcccctggaatgtcggagcctatctcctgaaccctttctttgctgggctctaccaagtgggcaaggcgacgtttgtgtatgttagcccaggtacagcctactatgggatacccatgaggttggggagcagggcagaaatcacagagctcatcctgtggcggccttcataaacctgccccgaaggccctaccttgccttgccctgccctggcctgaccttcctccatctcctgctccgtcccagccttgccagcacgactttggccacagtctgctgggaacagcgtttgcagtggggatgcctggcaagtccgggcaggcttaactcttcagataatcaattgctttttgacgatacacccgtgggtctgcttggccatggaagtgcgaacatgcatttgttttccagctgctgcagagagggggtccttttgcagggtgtggggtggctggaaatggtacttcttgaccaaacgcagggagaggcaggaacgcttgtctcctgtgggtttagcccgttagggcttgggtgggctctgggattatttgattagagatagctggtttgggcatgggccatgttgagagaggcatcacctctctgcttgcctgaggagagtatcactttcctctttgtcaatcaaggtcacctttatcgagggcatcggcaagccccattgaaacatggggacctttctgtctgcaccatgaggggtgctgattactgtgctgggtggctgggccagggtggcttgagatgaaatcatggggactgtggtaggggatgactgccatcccttaatggcagctctgagtccctgttctgtgtagtctttgtgtgagatcatttaggagaggctccttctgtgtttgggggtgaggaaggacactgggtgtgatgagatacctctttaaaaaaaggcagtgacaaatacttccctagatggccctccactccaggttccaactcagtgtgcgagggggagctgcctcctcctaaaagttcactctacagcctgatggtttagcatctttagaggttacagtgaacatggggttctatgtgcagataaacaagaccctagagccccacgttcccttcaaaatagttcacttgtttgaggaaggcttcagttcactcatagctagatgaggggaggcctctaagagagtcgctcattgcaggaggtcatctgttaagttctgactagttcattgattggcacctcctacccatcacaccagccaggtttgggcctgagattttagagagaagctgaggtttcttgtctacccataggaaacctgaagctgccacgggtatgacccagctctgcccctgcaggttgccccagaccccagctatggaaagacaggactgaccgtcttacctgcgtgggggggttctaactgatctaccttggcctctgcccacagaagcatagggtcattcataggacttcagacccacaaggaaaacaaaaggagctatcttgtgcagtgccagaagatttgttggtctagcctttgccaggggcaagagagactttgcccttcacatagcagagagctagctagccctaagaaggctctactgagatgtgtttaagaacatctagtcagccgggcgtggtggcgcacgcctttaatcccagcactcgggaggcagaggcaggcggatttctgagttcgaggccagcctggtctacaaagtgagctccaggacagccagggctatacagagaaaccctgtctcgaaaaaccaaaaaaccccaaaaaaaaaaaaaaaaaaaaagaacatctagttagctgagggtcctctgcctggagggggggcttcctgctgcttgtgagagagagtagaagcctggcagtgacaagaccccctagattcttagcttccatcatcccagaaatggctgtacttcttggatctacctcaaggctgctttgctgagagaatgctgaaagcttgtacctacagtgaacacacagtataatgctaatgtgctaatcagtgaaccaagacctgctaaggaacattgccaagcacaagtgccaagaatcaatccagtgggttgccaatgggtggcgtgctgccctccagcatagcccagatgtccatatgacactaagagccaccttcctggtgagtgcctgagtttcttacacgtactctgcttctgtaaatgggcattcttcacttcacccttttgaatttttggtgtgatgaggtctggtgtgcaggaggctgctgacccattcttgtctcccagcaggtagggtattgacaggggaccatctgatccctaaatcaagcaagcaagcaagcatacctgtaattcccagcactcagtgtttagagacaggaaaattaggagttcaaagctagtagtgagtttgaggccatcctgggctacataagatcctgtctggggagtgggaggaggaagagaaataaagagctttgccttgatactgtgatgggctcattcgcctctcaccccagacaggagttccgagcactaggagagattttgtaaagaccatgacctgttgttgggattctaggagaggccaccactccatacctttcagtaccttgctcccccagactcctctgagcacagcctactcctgccacccctccaacctcatcctttctccatgttctccatttctgctgtttcagcccttttgggatcacggctgtcctttctgttctcctcagctttggaattcatcagactgagccgtctggatctttctcttcagggcattagacccatcctgggtctcattttgatactgtcaccttgtgatctgtgtgcacacatcgcctattttggctttcaggttgttttgttgttgtttgtttgtttgtttgtttgtttttgaggcagggtcctgctttgtataccagatggccttcaactcgaggctatcctcctgcctctgcctccccaagagctggatgccagcatgtgtcacccccacctggctccttcatcctctctgaacacaatggggttgggttacctctcggtgagagataaacttgccttgcaagtctgagtccctgggttcaatctcaggacatcacagaaaggaaaaacagcgggacagtgaggtgtctcaacaggcggcctcacaagcctcacttcagttccatctctggaactcatggtggaaggagagaaccaaccccacagaactgttccccgacctcccgcacggatgcggtgccatgtgggcccacatttacacacaacgcagatacggtaatagaaagaaaataattgcaacgagatgagactgcctgttcttctgaaggtctgtatcctaatagaagggaagtgatgattctgtgttctcatcaggtcctgtctccttgatctgtttcttcaccttcttcatgccttccgggctctcaagcatgttagcacatgcgcagtgttcatgacatttccttctctgtcccccattgactccgtcctaaggaggccagctgctctggaattcaaactcttctgccctcgtgctgccatgcccgccctctgacggtcacttttatttctgtggttccagtttttctatgccccatttcccttctgaattctgttgttggggtgtagctaaagggctgacacttgtgttgccaattatccgttttgcttactctcctgtggttttcttctgctccccattccatccatctctgttctgtttgttctcttgttttgtgttgtttggagacagggtctcagggtgtagccctggaattcactgcatagaccaggctggcctacgaggccaggagagctgtctgactctccatgcccagttctttctctaatttcttgaggaagtgccactttatagttctatgtttgaggcaaagtctgaaaaggttcagtatactgtgcgggctacttctctttaagtctgtagtgttcctctcactcatgagtgcgtgtgtgtgtgtgtgtgtgtgtgtgtgtgtgtgtgtgtgtgtttagtactaatatggaggtcagaggacaggtcctcttcttcctgtgggtctctgggatcaaactcacattctgccaagcgcctttacttagctattattattattattattattattattattattagtcacgtgttggtctgtgtgtctgcatgtgggcctgtgcccatgaatgcagatgccgagggagctggaggatgggggcagcgatggcaggaggttgtgagtgcctgacgctgagccaccaaactcactgttgctccatctcctgcttcctatttttgtttttaaaacgatacctctgtctttttcccccacagaaggacaggattaagctaatcactggtgaggagagcgcaggagggttagggtccagacacaagtgcccgtcgctcttggtgtcctccattctgctgtcccctccctccccgtggcagtgtcctctctttagccaggtgtttcagatgtgaaggaaaaaaagtttttgacgcaagacacataaaacaagcaagatgagtaagtataggtgtgtggtagagcaggtatccacagatctgtcctggggccattttcgccgagaacttcagttgcttcactccaccagcctgttggaaggacatcctgaccacagcagcctctggactcccggccatctgaagtcactcttggcttgggccttaagtgtgcagagcccttcctccccctctttccatagccctgggtctctggtgaaacagctgagtttttccaccctggggctgaggtgcccctttcaggaactccgcgggcccctggggtgagttggcagggctcgtggggtgtgactagatacccactggattggaacttcccagcttcctcccagaaaacctggagacaaggccttgcttgaccatttaatttataatgacccttaacctgtgatgtcaccaagctgctttgactcaagtccaggaatgtgcacgggggatgcagatttgtttttagcaccgaggactagaactcttcggggagatgttcggggtacccagagacacttgtactgtgttgtggttagtgttctattttattttttttaagatgcttataactgaagatatcacactggtcggtactagacccctgatgagtacttgatctgagggtgtcgtgggcgtactgccttttttttttttttttaaacctccagtattattatatgcattgtgtgtgtagtgggggtggggactccaggggacctgaacatccattatggctgtgcttgcaatttgtgttttgttttgtgttcctgtggctatgcactttgtaaaaacactgatgccactacaccctgcaagtgtgaaataaagatttctctcttcatgatcacaattcggtgtccattcttcagaagggactgggcaaacttgagggattttttcttttaactactaggagctagtttcttgtctttccttttcttcttttgcattcttccttcctccctcccctccctccctccctccctccctttctatactcttctctcttctccactcctctcccttttcccttccttcccttctgcttcctcttctcttaaagaaattatttacacatatgtgtgtacctgtgtgtttatgtgtgccgtgtgtgtgcagtgtccatagaggccagcagagggcatcaggtcctctagagctggcgttctaggtggctgtgagctgcctaacatgggtgataggaactgacggggggggggggggagcctctggatgagcggtgaannnnnnnnnnnnnnnnnnnnnnnnnnnnnnnnnnnnnnnnnnnnnnnnnnnnnnnnnnnnnnnnnnnnnnnnnnnnnnnnnnnnnnnnnnnnnnnnnnnnnnnnnnnnnnnnnnnnnnnnnccacctcccctcctcctgcctcccattttctaataacctcatatgtatcaatggtgctgtggctggacatttaggttggatctgcttgggcccttcagtgttgagagtggattctccccgttcagcttggcagtgaaggtgagaaatgaccatctgtccgttagtccccacctctgctgctgtccttactgagaacccccccctcccggagcaaatagcacaatgctgttcatgcattgggtgagcaggaaggtctactgatgtccagtgacgtcatgtattatggctaccacaaaacagctgacaaagggaacttaaggagtgaagggtttatctagtctgacttactcaaaagtattacatttgttagtatgtgtatgtgtgtctgtgcatgtgcacatgcatgcatgtgtgtgcatgctacagagtacatgtggcgctcacagggcaactttccccaagtcagtcctttccaccatgcaagtcttggggaatgaagctcaggttgccaggcttggtggtcagtgtctttaccctgtgtgccgtctcaccaccggccctcttggctcacagttgaagggggtacagtccatcctggctggggagggagtgtggtgaggtacggtcatgctgcctgagtaatcagaaagccgagagggaacaggaagtagaaatggtctataaaacctcaaacctgccctcagtgagggtccctccagcaagagtcggtctgccttccaaatgttcctcagccttccaaaacagagccgttgcctgtggactgggtgtttggactctgtgcctatgagtggcatttcacattcaaacctgtaacatatgtcctaacagttgtggtctcatgtgacctggagctgggcagtgactgtagctcctgaggtgagagatggtgagtactacttcctgcctgcccacaacagactgcttttgtgtcagacagacatttttgtttgaaaagatttctacatggtcaacaaagcaagtgctggaaagccatgcttccgtttcctatataacccacgcctgtgttgtagctgctcttagagccatgctgctataaataacccagtgttgtccaccgtggcgcttccgttagcaggcgcccgcaggtgagtcagatggggtgcgatagagatgaccttaagccttgatggaggagaacctcgtagctattcttccaggaggagtgtggtctcctccgggtttttcttaaggaagagacggagagtagaaggttctggaactttcactgcacccataaaagaaagtcctcatacgtggtgagggttgtgctggctgttagtttggccccgctttgcattcaagccaaggaagtaatgttaggacacactctcacttctgggatccactgtgtgagggacttgggccttcggggagagggatggcctgacacagttcgtagcatgagtgttggcttaagctgtactaacaatacaggtagttaatccttgtgcaagcgatcacaccgtagggtccttccttcaggggctagtcacccctccctttaagcagtgtgtcaggaaactgactcaaagctgggccttgggaaaaagctcctcagctttcgatgtttacaatggtccccctcgataatgccaggatgtcgctgtcagcgatgagggcccagtgtcatggcagtgtcttgtcctcattcatctactgagaactctatgtgctgtggggcttctaaagttaccaaagcatttctatttatttatttacttatttatttatcatatttacactgtagctgtcttcagactctccagaagagggagtcagatctcattacggttggttgtgggccaccatgtggttgctgggatttgaactcaggacccgtggaagagcagtcagtggtcttaacctctgagccatctctgcagccccaccttatgcatttctgactgaaagtacgtcctctgggcctcctgaagcatatatggtctatatagtctgacagtgggttgccccttccctgaaccgaccactccattgctccctcggtcataggcagccctggtttcttctctcccttcctgcaaactagtgtcatgtgtgtgtccaagaaaccatcccatgagcttaggtattagagctgacatcaaggtaagagttggtgagtcaggacagataccccatgcccctgtcctctcccaggacaccatgtcctttgccccctctagattcattcctagggtaccaccaaggttaaaccttcgaccttgctttcctggtaggagatgagggtctctgtagacaccgtcacagaagttcatgccactcagagactgccccatgtagcctgaacctgtcagttcctctcttcagaacttccaaacctgctaaacaagccagccagcctcgcagtctgtccagttcacagtaaaccgagagagccaagtcacgtggcaactcctgcctgaggagagtgttcagcaggtcgtgcacttgctgggagagcctgaagacccgagttctgtcccagaacccacggaaaggaggaaagagaaccgactccacattgtcctctgatctctacgtgtgcacatgtacaataccacgcaagcacgctgcactagtgtgtggacgcacacactcgtacatatactcacacacacttatacctacattcacacacttgtacacactcatgctcacctataggtgtgcacactcgtatacacacactaaagttttagaaatgaaacatgccaaatcgtcccctttaagctggacctcgtctctctctggcataggtgaggggtgtggcatgcattttggggtatccttgctcacccattacacactaactgtaaggtctggttgctaatcagcatctctaacctccagatgccgccccacgcccatgtgtgggtgtctgttacattcctcactgccctgacaagaaacttaagggttcgcttttggattgtggtgtgggggtgcgatccatcatgatggggaaggcacaatggtaggaatgtgggacagacagctggtcaccttgggtccagagtggaaagacagaaatgagtgctgatgctcggcctggtttctctcttcatccacggcccccaacccatgcatagtaacacccacagtcagagggggtcaccatttaaaattccctgggaacttcctcacagatacctttgttttagtcagtgtttgttctgttgctgtaaagagacgccatgagcaaggcaacttataaaaaagcacttaattgtggggcttgcttagagtttagagtccgcgatcacggaagggagcaggaccacaggcaggtagacccggtgccagggcagtagctgagagtcacatcggatccacaagctcaagtcagagagggggaattaggaatgacttgggctttagaagcctcgaagcgcacccccagtgacacacctcctccaacaaggccacacctcccaatccttgctagacagctctaccgtctggggaccgagcattcagttataggaggccatgggtaccattctcaacctccacacttagcccctgttcttggagacagtcaaggtcttaggccattactggtaccacttgccttcatgtaggttcctccggaaacagaacctacagcaagggtttgggggccggtggctcgagaatccaaatgagcacaggaagcaggagcatggggaggcctgtgaatatctacacctcatttgctagcccaaactgtggcgatcagccagtctgtctgctatttaggacgatacttctctaagtcctcgttaactgcaccctgcagtcctaggtccggacgcctctgtcttcagccccgtggagcttgtgaccagttcctctagaccagggagtttttccagaacccttcccgctctgctcaacgtcagcctcattggtaaagcagcaggggtggggtctgactacagctatggccctaagtcgtaatcgattcgaccttagggataccaagaggaagcagagaattagacctgagataggggctttcttcacagatttctgatggatccgtggaggtgccaactccctaggtggataccagacctcgtgtgaactctcgcacttgttgtgagatgttccagaatcgctgcgggctaggatgctgacgaatcctggcattgttttctgaaagcgtcaaggtgcacgtggcagctccttgatgctgggctgagaggcaggtggcttctggtaccccgggtttggtgggtacctgttgccggttgctacctgtctttgtccactagggggcagtgttccacgctgcctaacagctctgataggaactccaaactgggttccttgaaactttatgacatttcagccagtgtactggctgaaggtcatatataagtaactccacactatgtaccaggcattttggaggtaatactgtactgtgtgcgctgcgctgtcctctgtccccatgaaaaggtgcttgatttacttgccccagaccccgttcagttcaattcacaaactgggttgtgccctgcagcattgagccaggcgtggtggcgcacgcctttaatcccagcactcatttgggaggcagaggcaggcggatttctgagttcaaggccagcctggtctacagagtgagctccaggaccgccagggctatacagagaaattctgtctcggaaccccccctcccccaaataataatgataataataataataataatagcgtttgaacattacttttctccagttccctggtggttccgaatgagatgcacttgcccaggtcaccctgggactcagagcagcagctaggatggggatccatggatctgttgctgctgcgtgcgtttgagacagggtctcatgtagcacaggctggcctcaatctgtatgtagccaaggatcaccctggatttctgatcctctttcctccacttctctgacactacatcccccacacctgatccattggtttctgttattagacgcgttctcacgaccggccaggaagaacaccacagaccagaatcttctgcggcaaagctttattcttacatcttcaggaacagagtgcaagaagcaagagagcaagaagcaagagagagagaaaagcaagagagcgaaaaagcaagagagagagcgagagacaagagagagagagaacgaaaccccgtccctcttaaggagcattctccttcgcctcggacgtgtcactccttgattggctgcagcccatcggccgagttgacgtcacggggaaggcagagcacaagtagtcataagatacccttggcacatgcgcagattatttgtttaccacttagaacacaggatgtcagcgccatcttgtaacggcgaatgtgggggcggctcccaacatctccccctttttcttttaataagagcaaataggccacccatattaatgagagtggagatagaggtcaaatccccagtgtgtaggtaaaggagccatgtacaggattagctcttaggcttacaggcttttacccagagcaaccctgacctgctcccgtgtcgttttgcctgggggaagggaactaggacactgaaccttcatgaaagatgacatgtctccctagaataggctcatatatgccgcagagcctttccattgcagtgcttagccttgcaactctctcgggctgatgaagcacactcactctatctcgtgcaatgagactagcctcgtgagatataagagctgagtggccagcgacctattnnnnnnnnnnnnnnnnnnnntgtactggctgaaggtcatatataagtaactccacactatgtaccaggcattttggaggtaatactgtactgtgtgcgctgcgctgtcctctgtccccatgaaaaggtgcttgatttacttgccccagaccccgttcagttcaattcacaaactgggttgtgccctgcagcattgagccaggcgtggtggcgcacgcctttaatcccagcactcatttgggaggcagaggcaggcggatttctgagttcaaggccagcctggtctacagagtgagctccaggaccgccagggctatacagagaaattctgtctcggaaccccccctcccccaaataataatgataataataataataataatagcgtttgaacattacttttctccagttccctggtggttccgaatgagatgcacttgcccaggtcaccctgggactcagagcagcagctaggatggggatccatggatctgttgctgctgcgtgcgtttgagacagggtctcatgtagcacaggctggcctcaatctgtatgtagccaaggatcaccctggatttctgatcctctttcctccacttctctgacactacatcccccacacctgatccattggtttctgcactgccttttatagtcccgggggatccgagggacactgctgttgagctgattggagtacccctgtctccatgcctcacacacagctcagtggatatagtcccagctcctgagcgtccataggctccaggtttagggagtagagccaaagtaggagatagcctcctccacatcaccttggctgggctgacttgtttataagttattgtgtaacttaagtctactcgttgtgtaacttaatcgaaaagcacccgcccccaccccccagctccacttctgacctaaaggttcacgttctcacggggtcccttacttgccctgcagaatgtcacccagaggacatttaagctcgactacagccgggaccgcttcctcaaggatggacagccattccgatacatctcgggaagcattcattacttccggataccccgcttctactgggaggaccggctgctgaagatgaagatggctgggctgaatgctatccagatgtaaggaaggatgcttgcccaagacccacccctttccccctacacacacacccacccctacacaagtaggagagagctctgtgtgcagccctgcggggctggctctttaggagtttgactggcctttctaaagagagcgaagcacttctcccttgaactttgtcctcagaaaccataaagctgaaatcagcttgaagaggcaaaggtaggaggaggccagagagtggatcagaaggtacagaggtctgcggccaagcctgacaggctgagttcaatcctggagacctacatggtagcagagaacagggtatcgtctgatctacatgtgtacacgcacatgtttgtgtgcacaaacaatacaccaataaagatgaaggcaggttttatatatatagctcatgaaacttacatttctgccaaggtcacgtctttggtccgaggtccatcgaggagccaaacgtgaggggtatggagtgtggctgcttttggtatggaggaagtgagcctgtgcttaggtatttggaacccagcttgtcttactgggttaattttttttttttttgaacccaggctataggttcacatcaacaggcacatgtccccgtctcctctgattctgtgagatgactaattgggggggaaaactggggcagctgatcactctggattttgcagagccggtgtgaatcgctgataacatcttaaaagataaaggttgagaaagccttagtgggtttggtagatacctaggggatccccccacttctgtttctacggcccctggcagagtggatctgggttcgctcacagttgttagcacgctgagttccagtgggctatggctgagcctggatctacgggggggggggggggggggggaggatgcttgtggggctcatcccttaaggctttcttgccgagggtcacagtgcactgtgtatccgcaccagaggtcggggagccagttccgtttgggtcgttctatttcctggcctggtattctgacaaaagtcttttgtcttcttgtagggtagagatttcttctgtggttttgctttcagtgttgagagccaaattcaggcttttgcatgtgatgggcaaggactttaccacaggctctgtaggtctctagactgggtgagagttttgttttgttttgttttcttgttatagaagtacatatagacataacatataacatatatatgtctatgtatcatttgcttgcaatgccctcagaggccagaagagggaggcatatcccctggaactgtagtttcaggcagttctgagtggccatgtgcttaggaaccaggcctagattctctgaaagagcagtaagggctcataaccactgagccagctctggctcgctctcgcgctctctctctctctctctctctctctctctctctctctctctctcgctctcgctctcgctctcgctctctctctcgctctctctcgctctctctcccccctccctccttccctctctctctctctccctctctccctccctccttctctctctctctctctctcacacacacacacacacacacacacacacacacacacacactgccccttttaaagaagataggatctctctctatgtagctcaagctaatctagaactcacaatcctgcctcggcctcttgagtgctaagattatattaacaggtaagcaccatgcctggattattcttacttttattaaagtgtttgtttttgagacggggtttctctgtgtaccccggctgtcctggaactctctgtgtagaccaggctggtcttgaactcggagatccacccgcctgtgcttcctgggtgctgggattaaaggtaaatgctgtgtgccagccatttctttgtttatttattttttaagtagagtctcatgtagcccaggctaccctcaaacctattgtgaccccatgctggccatttaacccttacccttctgcctctacttccaagcgccactgtgttctgctcaacctttatttttatttatttaaatttattttttattttttattttttttttccgtggcagggtttctctgtgtagccctggctgtcctggaactcactctgtagaccagtctgacctcgaactcagaaatccacctgcctctgcctcccgagtgctgggattaaaggcatgcgccaccactgctgggtttaacctttattttttaaatacgtacctcatattactttaacacgataattagaattcgtgcatttatttttcttgttaaagctttcggtgtgcttgacgatatattttttttttctgtcacagtttctatagattgttttcatcgaggcctggtttggggttccatgttagaaggggtgttgggcacgctcaaggctgtgttcgattctcagtgtttcaaacgagccaggtataaactgaagccaaaggagagtttgatgcagagaggcgtacagaagtgaccaagaagctgtctgaaataaatccgccttggcagacaaagctgacaactatcattcatgtcctcagagcagttctgtggatgaaggccatcacctgtaatcctaccagaccacaaacaaaactaaacaaacaaaaaaaccactggttcatctctgttcacgccatcttcccgtcagtcaggaagcaagagagagaatgaacaaggtcctgagtggccctgctggatcatctccagcgtgtcatagagagggcatgcctcggcctcctgattcatgccaggctctgtgactcccatcccagtattcgcccgacctggctggctgtgcttagcttccaggatcggaggcaatctgccacttcagtgtcatattgcaaaaactggatattagttcctagaaatcccactccttctgtaagggctttctttattacacctcgttttttacctctctctctctctcaccccccaccgtgtgtgtgtgtgtgtgtgtgtgtgtgtgctgctgtgtgtgtatggaagacagggcacaggacaacgtgtagaagtagctctctgcttacactatgctggttctgggattgagctcctgggtcaggcttggcgcccccttacccaccagtgccttagcactgccccgtgttccactcttagacccgaggtgtcaaatgctcacagagcctgggcccccttctcttccctcccgttcagctgccacctgggagggtttcagccgtgtgtgtcttcacaggtacgtgccctggaacttccatgaaccccaaccaggacaatatgagttttctggggaccgtgatgtggagcatttcatccagctggctcatgagctgggactcctggtgatcctgaggcctgggccctacatctgtgcagagtgggacatggtgagcttccagttgcagggtcctgcctgcctggtgggtgtgagtaagggcaggagaggccgacgggatgggggtggggctctgggcaaagtggattaaagcgatctaagactcaagagtctagagcaagtggtactgtgacccgccagtgtttattccttcagcgaggtgccaggcagcgaggagcaggcgggaggcagaacaaggggacttcctcatggcttcctctgtcacagacatggagtgcactctgctttgtctccctcatggattagttataaaattaagagaagctgtgcgcataaaaagagctctagggcttggagagatggctcagtggttaagagcactgactgctcttccagaggtcctgagttcaattcccagcaaccacatggtggctcacaaccatctgtaatggaatcagatgccctcttctggtgtgtctgaagagagtgaaagtctacagtgtgctcataggtatgaaataaataacaaaattgagcggggggggggggggggatgtagccccgtggtagggcccttgctagcatgtcatttccaacgctgcaaaagcaaacagcaagtaaaactataaggagagaaggaaagaaaaggagggagagaaagcaagtggctggagagatgactcagcagttaagagcactggctgctcttccaacggacctgggttccagtcacagcacctggatggtggctcacaacctctgtaactccagctttaggggggagtccagcgccctcttctggctgctgagggcactgcatgcacacagtgcatacacatatatacaagcaaaacacccacatacaaaaagtaaataaataaatatttaaagagaaagaaagtggggaggggttttactgagtgtggtgatgtctgtaatccaagcatttgagaggcacaggcaggaggatcaaaactctgaggccagcaggtgccctagaggatgtgtgggggtgggttggggggagtccagttttagacttagctcaaaacaaagtggggatggtgtcttgattctcagaacatgtttaatagagaggtcctaatttttctatattgtagtttcccagaagcctgggtcattttcccctgtcttttccctccctgctgacagcgatctctcctaaagtgacaaacaaattggctgttgttttctctctcaaaggggggcttacctgcttggctactagagaaacaatctatcgttctccggtcttctgacccaggtgagttaccgttgccccttaaaagacttacttgagactagacacttgataacaaaagagccaagcatttgaagggggacttcgtctgtataaatacccctgagtagggtggaagtctcatttcactggacagcgagtatgtaggagacacagcttcctttgcaggcttgaacagatctcactgataagcgggccgctttttgagtttgcaacctggttggcggttaaccaactgggttcagcacttgtattttcttcctacacacttagtatattacgcagccagcgagtcaaaatggcagggttgtttctgggatgatgtcactagttttcttggtagctgtgtgtcttctggttttttttttttttttttttttttttttgcattttcagagtgatttgtcagtgacagcttttcgtcttctcttttcagaacatgagacattattttagctgtaagaccttaaacagtcattcagttgcatctctgttttcacaaatgtgtgcgtgcgttcgtgcatttgtgtgagtgtgcccgtgtgtgctcatgtgtttgtgtgtgcatgtgtgagtgtgtgttgtgtgcctgtgtgtttgagtgtgtgcacatgagtgtgtgtacatgagtgtgtgcatgtgtctgcctgcatgtgggcctgcctgcatgtgggcctgcactcttaccttattactgctgttttcacatgtgttgtctcctgaatcttcctaaccattaaaaaaaaaaaacttatttatttttgtgtgcatgtgtctgcctgcatgtgggcctgcctgcatgtgggcctgcactcttaccttattactgctgttttcacatgtgttgtctcctgaatcttcctaaccattaaaaaaaaaaaaacttatttatttttatgtgcattggatgttttgcttgcttgaatgtctgtatgagtgtgacaggtcccctggaactggagttgcagacagttgtaagctgccatgtgggtgctgggaattgaacccaggtcctctggaagagcagccagtgctcctaacccctgagccatatctcctgataactgtatgaagcacctgtttttgtcagtctcctttgaggttgtaaacaaatggtttattagatgttactttggtgtgggagacacacacctgtaatcttcacacttggaaagtggaggcaggaggatcaaggtttcaaggtctttctcagctacagatcaagggtgattctagccttccacctttaagttatttgttttgttttggagataaggtttctctgtgtagccctggatgttctgggactctctatttagatcaggctagccatgacctcaaagatctcctgcctctgccgcccccccgcccccggcactgggagcatactcctgcctctgcccccccctccagcacggggagcacacacacctccatgccttgttaatgactataatgcatgtcacttacatcacatgcatgcttgcttgatgcccacagaattcagaagagggtgttggatgccctggaactggagttaaacacagttatgaggcaccatgtgggtgctgggaattccactttacactttatattgctgtaggtaatgctgacgttctgatcctcctgcctccacaagtgcggggattacaggtgtgtgctttcacgcctagcgctggggatcaaacaccagggcctggtgcacgctaggtaggcacgctaccaactgagccacatcctttacccagctaacttaatttagaaggaaaaaaggccctgctgtgtttgggaggaggacgcagtattcagcacctctctgtgcctatcccacagggcctggctgcctctgcttctaactctaagccccatagcagggtaagttgccaggagtacgcagatgtcaggacaactagcttaaagaactgtgttcagcagactgtggctgcctcgttttagaagataactgagggcagtgtatcctgggacaggctgtggcggagtctcctggctttaaaaggatgaggctgcctagctcagctgacttgaatttgagccctggaacccactgtgggacttgtgctcatgtactcccatatacacttgcacacacacacacacacacacacacacacacactaaccatatgacaagctagttgacaaaggcttgcgacagttgccacaccatcctgttttgcagattaccttgtagctgtggataaatggctggcagtccttctgcccaagatgaagcccctgctctaccagaacggaggaccgatcataaccgtgcaggtacctggagctgagctgtgtgtggaaggagggagagacgggggtgcaaccgtccatcagcgttatgtaaatgacaactgacacctggctgcagtactgaaaatgacacttttcttgtaactgactctggggaaagggttagcctgtcttctttctcttctcttcccccggccccctgtctatctgtctcttgtctctctgtccttctctgtctctattcctcttcctgtctctgtctctctgtccttctctgtctctattcctcttcctgtctctgtctctctgtccttctctgtctctgtctctgtctctgtctctctctctctctgtctctctctgtctctctctgtctctctctctctctctctctctctccccttcagtttgcgtctcatgtatctcaggctgatagcgaactccgtacctgaggataacttggagcttttgctccttctgtcttacctctacagtgtcgacatgacaggctgcaccacacacctgtcgtatgtggtgctgaggatcagacctaagaccttgagcacacagtcagtttaccagccgagctacacccacagcccaggacccttgcccagaattacgtacattttatgttcttagctaccactgaacccaaaaaattccaggacannnnnnnnnnnnnnnnnnnntttaaattgcttattttattttatgagaacaagtgttttgtcagcgtgtatgtgcgtgcaccacatgtgtgcctggggcctatggaggtcagcagaggtcattggtccccctggaactggtatgatgaatattgtcagttgccatgtgggtgctgagaactgaatctaggtcctctgcaagagcaacaagtgctctcaaccactgagacatctctcttgtcatcatttttttaaattttatatgtatgtttgtgtgtgtgtgtttgtctaagcttatgtgtgccatgtggcttcaggaaatggcagagttctgaaggtattagatctgctggaacaagctacaaggtgtttgggagccatcttgtggttgctgcaagtagatcccgggtcctctggaaaaggagccagtactcttgaccactgaaccatctctccagccccaccctatttatgttgttaattgtgtatggacttgtgtgtctggttgtctgtacatgtgagtacagttgcaggtgaaggccagaagagggggctggttcccctggagctggagttgtcggctgccctacgtgggtgctgggtactgcacacacattgtgcacatacacacatgcaggccaaacacccatatacataaaataagaagaagaaagtccaaaaaggtaagtgacttagccagcaatgcctggctggcaggcaggggagtttcaagcacacacttcgtctgctgacaccagagtggctcgtccttgtacagcaagcttgggctgtgactggcagaaagacttcgggcatctctgaagtggccagagcaagtgacgaactgggaccgtgctggttcctctcacacttgctgctgcactctttccccgtatgttccgggccctgcaaagacacgtggttgtaggtgcaccccagggtgcaaaatgtgtacttgactttgaacaactttcagtgtctgtaaaatgcttctgtggaacgtgacgcccggttgagtgagcaccagcagagcatatttttatggaaaggagcaaagttgtgtgagnnnnnnnnnnnnnnnnnnnnctgcaactttactttttttaattgttttatttaaaaaatttaagctgggcagtggtggtgcacacctttaatcctagcacttgggaggcagatttctgagttcgaggccagcttggtctacagagtgagttccaggacagccagggctacacagagaaaccctgtctcaaaaaaccaaaccaaaccaaacaaaataaaacatttaaattgcttattttattttatgagaacaagtgttttgtaagtgtgtatgtgtgtgcaccacatgtgtgcctggggcctatggaggtcagcagagggcattggtccccctggaactggtatgaagaatacttgtcagttgccatgtgggtgctgagaactgaatctaggtcctctgcaagagcaacaagtgctctcaaccactgagacatctctcttgtcatcattttttaaaattttatatgtatgtgtgtgtgtgtgtgtgtgtgtgtgtgtgtgtgtgtgtttgtctaagcttatgtgtgccatgtggcttcaggaactggcagagttctgaaggtattagatctgctggaacaagctacaaggtgtttgggagtcatcttgtggttgctgcaagtagatcccgggtcctctggaaaaggagccagtactcttgaccactgaaacatctctccagccccaccctatttatgttgttaattgtgtatagacttgtgtgtctggttgtctgtacatgtgagtacagttgcaggtgaaggccagaagagggggctggttcccctggagctggagttgtctgtcggctgccctacgtgggtgctgggaattgaacccaggtcctctggaagagcagctggtgttcttgaccactgtgccatctctctggctcctcgtgctgccacatggcagctgacagccatctttggttccagggggtctgatgccctcttctgtcttccctgggtactgcacacacattgtgcacatacacacatgcaggccaaacacccatatacataaaataagaagaagaaagtccaaaaaggtaagtgacttagccagcaatgcctggctggcaggcaggggagtttcaagcacacacttcgtctgctgacaccagagtggctcgtccttgtacagcaagcttgggctgtgactggcagaaagacttcgggcatctctgaagtggccagagcaagtgacgaactgggaccgtgctggttcctctcacacttgctgctgcactctttccccgtatgttccgggccctgcaaagacacgtggttgtaggtgcaccccagggtgcaaaatgtgtacttgactttgaacaactttcagtgtctgtaaaatgcttctgtggaacgtgacgcccggttgagtgagcaccagcagagcatatttttatggaaaggagcaaagttgtgtgagctggctgggccctgagatatcaaatggagtgtgtttttctctgaggactgtggttcagagtcctgatggagtgggggcgtggccattgggtataggtgaggtgaggtgatgaaccggctgagtgggtcagggattctcgctttgaggggacaggtgactgctcattgaggaatgtagctcctgacccctgagtgccccttatctctcattcaagtagagcgtgtacaagaggccacagcttcctgtgtgaagccagtgactctgaaagtcaagcaagtctttgctctgcacagctggatcatctctgtgtatccatgtgcacatgcctacacgtatgtgtgtgcacgtgcacgtgtgtccatgaagcttgtctgtggaggccagaggaggatacctgttcaatcactgattacccaattccctcgagatggggtcatccctgaacctgcatttattatgattgactgataaaaatctctggtttggcttttgagacaggatcttaggtagcccaggctggccgagaactcccaatccttccctcttttgcctcccaagtgctggaattttaagtgtgcctccatgtcctatatttgatcacaggtttgtttgtttgtttgtttgtttttttccagagctgaggaccgaacccagggccttgcacttgctaggcaagctctctaccactgagctaaatccccaacccctcatcacagtttttataaagttttctttagccaaagatactgaaaagtcgtgagctaaagtgtgacccctgggatgcggtcaggactgaaagcaagcatcaggcaagtcggtctctcctaagcccaggtcaaaggaaggagacccacgggccggtcgatggttcagtgggtgagaaaacactgcccaggcacgaggactagagttctaaccctcagggcccatgtgaaaagccaggaatgtctacatgcagatgtgacctcagcactggggtagggcaatgggacaggagggtccacctgcctccagggtccacctccttccgggattaaaagcgtgcaccaacactgccaggctaaatcaaaagaacttttttaaaccaagaaatacaagaccttctattttaaccctgcagaagacagcaaacctgcacaccctgaggatgtttcttctcctgtccatcttgggcactgctcctaccgggtgactctgctctctgcctggtctccctcctctccagtcactcaaacctcaggagccagaagcgaagttcgccgtattttgagtgttttctggaaggcgtttttgtctctgtttttctcttcccttttgcagtttaggtgatgtgacctgtttcctgtgtggcattgccacctcatttccctgtcaaaggccttgtcacatgcgtacagtttggacatcgtctacagttctttgtacataattggatgtctctctccttgtctttctgtttgtttgttgctttaaggcatagttaccctgcgtagcccagactggcctcagaccctgtctgtgctcctcctgcctccctggtactagaattattgagtgtggcccaccaggtcccaccagcctctaattcaaagcgtatctgaggttgaccttgaactcctgattctcccacctttgcctcccaagttctgagctggcagatgcgctcctgtgcctggtgtatgcaaggttgggaatccatactgggccttttgtatgctacttaagcaagcactctaccaacggagctacttcccaaatcccaccccactaactttttaaagacagggtctcactgaacctagggcttgcagagtgactagactggcggctgatcagcgagtccctggtccacccgtctcctcctctcagcgccatggttaccgacaatgtgccaccatgggtgctgggatgccaactcgggtcttcacccacttgatcttaaccaagaggctgagacccaattccagtcatggccccagcccctgttgctgccctctgaaaggtgtttgcgtgtcgactaagctaagctagccttgggctttcagtgggccacctgctcctgcctcttgagggctggagtggcagccgtaccccaccacacacagctgtgacagttgcttttgtctgtctcttcagccagctctagaggcagtgaggtcttcacccagagcttgaccttggcccttctcatgggagcccagggaccttgaggaggagaggttgtgtctgtaaccagggtgaagagggttggttgtgtctccaccccagcctgaggacaccaaggctcttctccctttgctcttccagatcagggacaccaaacttgccccagatacgcaaatgattattttcaggagagataaagcaagccggggcacagaggatgggtgggtctcacgtgaagtgttaatctcggtttttaacctaaaaatgaagtaaaactagtgagtcatgctgcttcaggcctgtcaacccagctcccagaaggctgtgctgcttcaggcctgtcaacctagctcccagaaggctgacacaggagggctgccatgcgttcagggccagcctgggctagtgagttctatgctgagctatagtgtgaaagcactgtctcaaaccaacagcaacagcaaataaagttgacagcacccttttgtttctggggcggggcggggaggggtcactctctggactgagtgttcccaggttccttgggtctttttcagaaaccggaagaaccccatgcaggctgtcatgacaggaggtgtgcggaagcagagccttagcaaagagtgtgtgtctataaccagtgctgccagagaagagcggcctcttgacttagggctgtggttcccagcctgtgggtcgaacaaccctgtctcagggctcgcctaagaccataggaaaacaaacacagatatttacactgccattcatggtaggagcgaaactacacagttaggaagtagcaacgaaatagttttatggctcaaggtcaccacaacatgaggaactttattaaagggtcgaagcatcagggaggttgagaacccctgagttagagtaaagctctttagtgcctgggttctctgtctcagccagggttacgattgctgtgataaaaacgaggaccaaaggaacttgggggaaggaaaggggtcatttagcttatgcttcaacattgtagagtcaggacaggaactccggcatggcagggacctggaagcaggagctgatggtgcagaggctatggacaggatgctgcttgatggcttgctcagcctccttactaatagaacccaggaccaccagctcagcgatggctccacccacctaggctgggccctcccccatcaatcactaattaagaaaatgccctgcaagctggcctgcaatctgactttatggaggtattttctcaattgaggctccctcttctctgatgactatagccaacacagcctcctttttgggaagggtagccaaagctgggtggctagttactaaggggtgaactatgagtgttggtgggcctctgggtgttttcctttgtgtgtgtgtgtgcattgcacacatgtggcagtcagaggacaaggcttgggattgggttcattccgtactccaggctagcttgctcaggagcccctgggagagtctcctgtctctgctggtctctcccgtattcccacccccattctgccacaggagcatggagataatagatgtgcgctagccaccacatccatctttttatatgtgttccggcgtcgagcttggggtgtcggtcttgtgcagcttgctccttttcccgacaagtcatctccccctgttttgattggtagatttgagatatgcaaacgtttctctgatgtatatgtcttttcccacattgctgttaaccctgtgtacatccaattatgcgtaggcataagatttcagataagggattctctcaagagggcacagttggctttattgtgcatgcacgccagaccagttcagactggatctggggtatgtttccagagattggtaaggttgtgttggcatctgctgatctctggtcctcctttctaaacacacaggttgagaatgagtacgggtcctactttgcctgcgattacgactacctacgcttcctggtgcaccgcttccgctaccatctgggtaatgacgtcattctcttcaccaccgacggagcaagtgaaaaaatgctgaagtgtgggaccctgcaggacctgtacgccacagtggattttggaacaggtcggtgtgtgtaggtagcatctagaaaacagctattgcagatagagtgaggtgtctcagagtttcctctatcaggtgggctagcgagctttgcgtgactgtaacaaaatacctgagggagtcaactcctaaagagggaaggctttcctttagcccacagttgcggcttcaatccgccatctgtttgtcctgtaatagagagaacctttctgggagcatataatgaaatgagacccttttacctcatggcctgagaccctcaaagagggagagatgagactgccaccctctctttcagggacatgtgcccagtgacctaaagtctactgagctctgtccaccccaccccgctctgtttgagacaggatttttttgtagtttaggctggctgcttattcatggtctagccaaggatggcctgaagctctgggtccccttacttccatctcccaagggccggagttctagatgtgtgctactccccaccctcggcttctttgtactattcttccacttacaagagtcaaatgacgggttggcaagatggctcagtgactgagggtgatcgccaccgaatctgatgacctgagagtgattcctgggacccacagagtgggaggagagaggtgacaactacagattgtcctctgaccaccaagagcattgcgtgacatgtgcacaggcacacaagtacacatgagtgtacacacgtgtgtgtacacatgcatgtatacatacacacaaaattaccaaataaaaatgtaatgaaaaaaacagattcagccgacagattagagcatagagcatacctgcaatcccagaaattaggatacaagtggggggaggacctctgagttcaaggccaacctggtcagtggagaaagtacagaacagccagggctgtgcaggggggggcggggttcgaaacagggtttctctgtgtagccctggctgtcccggaactcactttgtagaccaggctggcctcgaactcagaaatctgcctgcctctgcctcccaagtgctgggattaaaggcgtgcgccaccacgcccagccagaataaccgtcttgaaaacaacaaaaacaacgaggacagattcagatggagattaatgagttttacaacagggggctgggaagatggctcagtggttaagacctctagttgctctcacaaaggacgagggttcaattcccagtacccacatgggagttcatacatacacacacacacacacacacacacacacacacacacgcaaaacaccttttaaaacagaatttaaaacaggctggaggtatgccttggtgggtaagaggactggctgctctttcagaggacccaggttcaattcccagaacccacaatcacctagaactgcacttccaggtgatataaagccttctcctgacctccacacatagatacacaaacatacacatagaatatatatatatatatatatatatatagagagagagagagagagagagagagagacagagacagagagagacagagagagacagagagacagagagttgctgttttgttttgttttgttttgttttgttttgttttgttttttcaagacagggtttctctgtgtagccctggctgtcctggaactcactttgtagaccaggctgacctcgaactcagaaatccgcctgcctctgcctcccgagtgctgggattaaaggcgtcgtgcgccaccatgcccggctttaaaataattttttaagtgaatgttcaatgtgagtcttgacagtagtagcaagttccaggctaaggctatgtgagaccctcacttaaaattttttttcccagggcatagtggtgcataattataaccccagtactgtagatacacgaaggcaggaggattgatttgacttagaggccagccggaactctaatatactacttaatacattctagactaggaagactacgtactaataccctattttgaaagattcacaaacaagggagctggagagatggctcagaggttaagagcatctgctgctcttgcagaggacctgagttcaggccccagcacccacatggaggctcatagccatttggaattctagtctgtcttagtgagggtcttactactgtgaacagacaccatgaccaaggcaaaccttataaggacaacatttaattgaggctggcttacaggtttagaggttcagtccattatcatcgaggcaagaacatggcagcatccaggcagccatggtgcaggaagagctgagagttctccatcttcatctgaaggctgctagtggaagactgatgtccagacagctaggatgagggtcttaaacccacacccacagtgacacacctaccccaacagggccacaccttctaatgatgccactccttggactgagcatatacatatacagtttcgtcacacagtcccacagaatctgacaccctctttcggccttggcaggcactggatgcgtgtagtacacagacgcatcctctggcatacgcatgtacacataataagttttatgaagaggatgcacacagaaataggagggagggaggagagggggagggagagaggttcagaacagcagtttgaatggctgaggcatacagattatcctccaatggtggccattcaccagaggacacagttagagtggccttgtctccctgtgcctgttagttagctggtaggtatctgtggctgtcccgtgtgggcagtgctgtggagtgacaggggaggtctctagaacagactggtcctggaggggaacaggtagttcagcctctggctgtaggcagacatggggtcagggggacagcttagaaggcagagctatgagctcctcaggcctgcattcgaacaaagccatgggggcctgctcagggagaccgctgtgtggggtggtccccgtacgttgctcacacgggccaccctagggcaattcatagctattccttgggcctttgggccttgaaactcctgtggatcagggaaaggtttatgatatacatgcctagaaattacgaagggaaaaggagagagtgtgggggaaggcaggggactatcttgctccatttaagctgttattattactattgttgctgactacagggctgtagactacagggctgtaatgtaggctggcctgagtctgtgtgtacaggggactgagcccagggccttgcgcatgctaccagctgagctaaatctccaacccagtttgggttattatagcaaatgactgagctgggcatagtggtacatgtctatactctcagcactctgaagactgaggcaggaggataactgagtttgaggtcagtctgggttgcatggtgaattccatgccagtcagagctgcatggtgagaccctgtctcaggaaaatctaaaagacataaacaaaaattgcctgccccgctcaccgttccaagtgctccaaagcccaagatcagggtcccctcaagttcagggctgagtttgggtctctccttcaactcagtttcctgatgagtccttatgtggcagaaaggggtaagggcataaaatgccattataaggcattaaatgccattaattcataacaggggaataggagggcctggctaagtcacttcctgaaaacacatctttaagacaaagttttttcatgtatttctttttactggaggagggtgctcaagagccaggcacggagcatgtgtagaggtcaggggataacggatggcagtcattttccctgttgtaccatgccagtcctggggattgaactcaggttatcagccttggtggcaagcgccttttccctctgagccctcttgccggccctccacttctcagacattcctatttgggattatagtccaacttttgaattccctaccagtgaccttagcaggctggttagctccttatgcccgtgacggactcttcttctctttcttgaaatttccaggcaacaatatcacacaagctttcctggtccagaggaagtttgaacctaaaggacctttggtaagaactgggggtgtggggaagagactgagcttgtacacagctcttcccagaggaggaggcaggctgcagaagagaatgggtccatctttggtggtttattttttatttttggctctgggatcagcagctgatgggactggggcagaagggaacgtagcccttcctgactcctgagtgacagctggattggtgctccagtttggagactaaagctcttcacgcgagtgaaggagatgcagagaaccaggactggccaggactggcttcggctctcttggtttttttggttttttgttttgtttttttccttttctctcctctctccccactggatctcaggtagcccagaggctcagaactcagtgtgtaatggaggctgaccttaaactcctgagactcctgcttccgatgattctcagcctctgggactaagtgtgcactgccacacccagctttacgtggtaactcgcacccagatgctttctgcacccgaaggaaggctggtgctctaactgagctacctctccagggagcaaaggccagttgctctgacctgaggagcctagacatggctgggacaggatctggttcacatgtgtattctttaaggtttattttattactactattatggtggtgatgatggtgatgatggtgatggtggtgatgatgatgtctgtgtacaatgcacatgtgtgggtgctctctgagaccaaaatggcatgtaggatcccctggagctgcctgatgtggggtgctaagaacggaaatccagttctctggaagaacagcagatacttttttggggggggcgttgctggggggaggttcaagacaggatttctttgtgtgtatccctggctgttatagaactcgatctgtagaccaggctggtcttgaactcgcagagatcttcctgtctttacctcaagtgctgggataaaaggtgtggtcaccacatgctcagcggatggcttttaacctccaagcagcttctgtagctgagagacttgtttcttaactctgcaagcttctgcaccctgcccccaccccccacccccttacccctccccgctcttgatgctctggttgaaatatggaattaattctgctgggcctgggagggcctgactgttcctggagcagagcagccaggaagcggcaaggttgcagttttgataagcagctctgctgagcctgctggcttgctgggagaagaggccagggctgcctggacctctgtcaggcctgcattcgcagctcttccctccaggttgctgcaacaagccttgtttgcaaaaaaaaaaaaaaaaaaaaaaggctctgctggaggtctgcactgcagagcctgctcaggcaggtggagccatttcctggaacctctccaggttccctttctctattctgactttgaactgatgttgcttctggccagcaggtctcaagatcagtattcacacaaaaagggtgaattgtgcgtaatggataaatgtggggctagatgtttgctgttgttgttgttaatgggttagggttagggggttaggggtagggttacagagagcccaccagatcttaccagagataaccacttagacacagtttatacccagttgaaagtctttgttctagctagctgggactacactcaggtcttggtgacctcagtgtagccctgaggatttagaccaaggggcttttaaaggaaaaaacaaaacaaaacaaaacaaatctgttctctctcttagcagcttcaggggaggattgctcaagcaagcagattaacagaagccaggaaagtttagctgggcatctgagcctcagggcctagaatagaattggatgcttttccactggattcttcatcaaaaggattaaatactgattaaacccaaaacagcctcatcaaaaatacaagatgggccaggcaagggtacacgcctttaaccccagcacttgggaggcagaggtaggcagatctctgtgagttcgaggctagcctggtctctagagcaagatccaggtctatagagtgctgtaccctctgcactgtcttgctctgtcacacgggtattgaatacagggcttacatctggtaggcaatttctctaccactgagatacatccccagcccttgggttttgtgtttcgtttccaatacagtcttgctaggtagcctccagtttcagattaactatgcagtctagactgactttgaactccgaattattctgcctcagcttcctcagtgcttagataacagttatgtgccaccatgtctgaccagagctgctaattatgaagacaccaccttgcctgactaaatgttttggtattggagggaaggggcagggagtgtgggacattcccagctgacaaaactgacaaaggtaaaactttaggaatcagttgtcccaaaatacccacggagaatcgggtgtgagatacccaagtccctcctgtaagatgatgcggttcctatagatttaagttgcacatcctgtccttggcataattcttctctaggttgcttgttccagacccagtatagatgctatactgagagtcatagtaatttatcattcaggtaataatgacaggggtggaggagtttatacatgttcagtactgatgcaaagtttttctcaaaaaatacattttcttttagaatatatggtctcatgtagcccaggctggcctccaactcaccacatagctaaagagtaccttgagccgggcgtggtggctcacacctttaatcccagcactcgggaggcagaggcaggcggatttctgagttcgaggccagcctggtctacaaagtgagttccaggacagccggggctatacagagaaaccctgtctcgaaaaaccaaaaaaaaaaaagagtaccttgaattgataatcctcctgcctctaccacctgagtcctgggattacaggtgggcaccgcccacgcctagttatcacagggctggagatggaacccagggcttcaatcactctgggcaagcattctaccagttgaaccatgccccagatatttctgattgttaataggttgggtctacaatgcagaacccatggatttggagggttgactgtagttgtagtatgtaagatgaaatgtcactattggtggacactcagagacccagtatagatactgttgtaattggaggtcctcatgggaccctccctacattacagggacacctcagcatcaactcaaggttgtaagtgtctcctgagcaccaccccttttccctttcagatcaattctgagttctatactggctggctagaccactggggtaaaccccattccacggtgaaaactaaaacactggctacctccctctataacctgcttgcccgtggggccaacgtgaacttgtgagtacccaggactgggagagggagccctgtggctgtggctcacagtgaagtatgtgtgttctcttatttctctgtaggtacatgtttataggtgggaccaattttgcctattggaatggtaagatccgtttcacatccattggtaaaagcttatcctgtttccagtgtatgatttgggggatggtgtatctactggccaatttttattttctgtttccatttgtcttctaaattttctaatgtacaagaatcactcatctaaagccaggtgtggtggtgcatgcctttaatcccaacacttgggaggcagaggcaggcggatttctgagttcgaggccagcccggtctacagagtgagttccaggacaaacagggctacacagagaaaccccgtatcgaaaaaaacaaaacaaaacaaaaacaacaaaaatcacccatctagtcatttgagtgtgaaaccttaagggccgtagtctgatcatttaagggtcttatttttaagccagtctgcctggcagtctagtgtggcggggtatgtgtttacatactccgctttggtctttctgtatgtgcgttcatgcattttgcaggggcatgtatacatgtgtatctgtgggtgtgcacacatgtggaggccagggacagcctccagtgtcgtcggtccttgaacaccagccacctttttctttttctttttttaaaacaagatctctcacagacctggatcttaccaagtagactgagctggccactgagccaagggagccatctgtctccacctcccctgatctgcctgcctgcctgtctgactctcattattacatgtatttacttacgtgtatgtgggggtcaaagaacaacccgaaggaactgatcctcttccgccgcactgtgggtgctggggattgagctcagatggttcggcctggcggggcagagctttaccgctgagccatcgctccactcccgttttaattgtcttttttttttttaaagatttatttattattacgtaagtacgctgtagctgtcttcagaaactccataagaggtgatcagatctcattacggatggttgtgagccactatgtggttgctgggatttaaaccttctgaagagcagtcagtgctcttaactgctgagccatctctccagcccctgtttgtcttttttaaaaaaaatatcataaaattgacagtgttaaataagtattctaaacactttcaaagttgaacagtccttaccccctacttctggaacattgtcccaccctccagaaagaagctgcacactccacactgactcccctctcctcctcacggcccctggaggtcactaagctcttccatgctgccaggggctctcctgctctggatattgcttataaacagagccatataatgtcgaggtgattaattacaagtaatctgatgtctttgatttagcctaatatgttcaaggctcatccatgttcttttgtgtattaatgctttatttttgtcactaaatactattctagggttgggggtatggttcaggtgctagggtgcttgtctcgcatgcacaaggccctgggtttgagccccatgcacagcctccacatggtgggtggtatgcgtttctaatgccagcacttggaaggaagaggtgaatggtagttttcaggtggcacaagtgggtgagaggccactcgtgacagtctttcaaaaaataaagaaagcgaaggctgagtcagatgtggtggtggtaaccggtaatcccagcatttgggaggtagagacagagttactacaggtttgaggctagcctgatctacataagggttacatagggagattctgtctcaaaacaaaaagtaaataaataaataatagaatctttttttttaaggatttatttatttactttatgtatgtgagtacactgtagctgtcttcagacacaccagatgagggcatcagatcccgttacagatggttgtgagccaccatgtggttgctgggaattgaactcaggacctctagaagagcagtcacatgccttaagtagggactctcccccgtggtgctgataacttgctgtgcaaacacatcgacctgagtttgagccctggagcccaccaaaaaaaaaaaaaaaaggctgggtgtcagcactcaggaggcagagagctttgagaccagcctggcctgcagagcaagtctcaggacagctaaggccccacagagaaaccctgtctcaaaaacaagacgaacaaacaaaacaaaggaaagaagaaaagaaaagccaagccgggcgtggtgaggtgaacttctgtaaccctcgtgctagaaaggggagacaggcaggtttctggggcttgctagtcatttggtgtagctgtagctgaattagaagctccaagctggtgagataccctgtctcctaaaccgaattgagagccaatgagatggtccagtggctaaaagttcttgctgcccagcctgaagacctgattttgatcctcagaacctacgtgatagaaggaaaggaaatggctcctgaaactgaccttcccatgagtcccggggcacatatgtgaacaaaattaattaactcagttttttcatccattcaaaccaagatggtaggcagaagttctggcttttatatgcatatgcacgcacacatgtgcctccatgtgcaggcgtactcatacgtgcatgcatgtactcacacacacataaagaactagaaaagttacacttgtttttcctgaacgccacacactgatcctcccccaccccctcgccaggcttaggctgaggacccagggtcggccagcacaggctggtctgcctgtaaggagtgtgacgcttacagatgagtcaagtgagaagccactctggagttaaaccacacagaaggtgaactccttaggtgaggatgtggtttttaatctcgctgtatctcatgggaaggaacgtatttgaacctgtgcgtccgcccaggcaggcagacctgggggaaagctgcctctgaggactagggagtagaggatgttaatacagcagtctgttggctgaaggtctgggtcttctaaggtgagattctgtgcggagcagcaatgaggaagttagcgctgacctgatgcccactcgttgatatgtcagccctctgacagctggtcctcagcccgtcacttgtgaacttaccgccaagcactgacgatctgttatgtttggagcctcatttacttacaaattagagccgtcagagaacagcttcgttctcgagtgtgcgtggcagagggctgctgagttagaaggggaagaaaaccttgcaggctcacggttagctgcagtagtgtcgctatctcaagggctgcaggtgtcaccctctaggtacagtgccaacttagcctgcacaaggtcccagtactgccaaaccaggtttggtgatacatagctgtgaccccagatacacacccatagtccctgatatacacctgtgaccccagatacacacctgtgattctagcacctgagagagacacctgggatcccagatacacacctgtgatcccagaaacacctgtgaccctctgacatacacctgggaccccagatacacacctgggaccccagatacacacctgggaccccagatacacgcctgtgatcatagcacctgagagagacacctgtgagcccagatacacacctgtgatcccagcacctgagagacacacctgtgatcctgacatctgagagataagaggcagaagaccagaagtccgttatcggccttggatgcatagcttgtttgaagctatcctgggcctcgtctgaaagaaagaagaaaagggacgaaagaccacccctgcccccagcccacccccaatccctcacaggaaccagcttccagggcaggactcctcatgtgtctctcatgcatgggtaaatttccaaaggactggccaaaagggaacctaaccctgtaagtatccactttgacaagcttagaagtttctggtctagactctgcaccatgaacaataattgcaagggatttttttttttttttttttttttttggtgcttttatgtgcccagccttgagtctgctcattggtcttgtcacaggtcacattctgggaagttgtattgattatgcttcccattgctgtgagaaaaacctaacaaaaccaaacctgaggaagtggtcaggagctcgaagccgttggccgagtcatctctgcagtcaggaaagggccagagatgagtgctggctgggactcgactggttttgtctttactgtgggacaccagcccatgggatggtagcttcttccctatctaggtagagcctctcctaggtgcgtctaagtcaataatatcaataatattattgactgtcgagtcaataatatcagccatcacagaaaatgttccttgggtatgttctcaggggcagcaccggtcccacaaaaacaacagggtgtagaagacaaggtgatgtaactgtgaatgagatggggggttgggggacatgtgatgtaactgtgagagagatgtcggggtgatttaactctgtgagaaagtcggtggtgatgtaactctgtgggcgacttcggcctatcctaaggaaaccttagagtcttgggggcaggggggggcagggaaaagtggttctacgtccccagactgattggctgttagagaaaggctttccctggagggatgtaaacggagaaaaagcagatcagagcactggctgctcttccagaggacccaggttcgattcccagcacccacatctgcagccctagtcccaggggatctgatacactcttccagcctctgtggatcacacacggcgtgcagacatatatgcctgtgaaacacgtatgcacataacatgcaaaatgagagtgaccttgaacttctaatcttcctgctccacctcccagatgctcagttacaggcatgggccagcacatccggggtctgctgtgctgggcaagtgcttgaccagctgtagaaatgctatcccccctcttaccatttggggctttaatgtgccttccacttctcctcaccccaacgttgagcccctgagcaatgacctcaagtgactgactggtgaccttttctgtcttccaggtgccaacacgccctatgagccacagcccaccagctatgactacgacgccccactgagcgaggctggggacctcactaagaagtattttgctcttcgagaagtcattcagatggtgggtccttcgaactctcagagagctgggctgctggggggcctgctgtgaactcctcatggctctgtggatggatcccttgctaacggaggtgaaggagggaggcacaggttttgggtacggtgtgcctggggaagaccccatgagtttatcagcaaaggctctaggctctgcacccttcatctgtgaggctgggattagggttcctaaccatgcgatagggagagcaaaggacatgtgtgagccatccggcgtggtctctgacactgtgggcagcaagtagaagccagaagatacgtccctgtggtggctcgaatgtatagggaggaaaattgatagccaccagtgtgcagagcatctgtggtctgtgcagagggagatgctgtgctccacctggggcagtcgactgctgtttcctctagctggctcgggaacgtctctgttctgccagcagccagcctttgaagcacctaaagctctcaggtggggtttcctgtctctgtggtgaattgaaaaaaaaaaaaaaaagcaaacccacaatttttttgctcagtcacctggttttgaagttttctgccaataagtggtaaaagttaggtgtcgtgtaatgtcagtgtaagcatgtgttaagatttgtgttcagaaatattttcatattttgggggggaggggggcttatgttttgagacagggtctctctgtgtagatgagattcctactttgaactcacagagatctgcctgcctctgtctcccgagagctgtgcaccaccacctggcatgttatggaaaaagagcatgatataaacctagtgtggtgcatgcctgcaacccagatactgagcaagaggatcgatcaggagtcaagtcatcctcaattatatgatggctcgaggcctcagctacatagatgaaagcagagaggggaggaggggggaagaaagagaaatatatattttcatttaaatttcctttctcttttttattaatagttttttatttattatttaagatttgcctcgagccaggcatggtggcgcacacctttaatcccagcacttgggaggcagaggcaggtggatttctgagttcgaggccagcctggtctacagagtgagttccaggacagccagggctacacagagaaaccctgtctcgaaaaaacccaaaaaaaaaaaaaaaaaaaaaagatttgcctctgtgtgtgtgtgtggatacccaagggtcccaaaaaggtcattgaatcccctggagctggagttagcaggcagttgtgagctgtccaatgttgtgaattcaagtggagtttcctgaaggagcaagaagcccccttaacctgtatctgaatggagcctccagcccaatacattgtaactcttgatacactgagtctggtttctgttttgcacctgtgtatgtctctgattgtaattgtaactttttttttaagatttttatttattatatgtaagtacactgtagctatcttcagacacatcagaagagggcatcagatctcattaaggatggttgtgagccaccatgtggttgttgggatttgaactcaggacctttggaagagcagtcagtgagtgctcttaagcactgaagtatctctccaacccgtaattgtaaattttgttgttgttgttgttttattgttgttgtttttcgagggtttctctgtttagctctggcttttctggaactcactttgtagaccaggctggcctcgaactcagaaatccgcctgcctctgcctcccgagtgctgggattaaagtcgtgtgccaccacgcccagcttataattgtaattcttgatacacagagactggtttctgttttgcacgtgtgtatgtttgtgtttgtaagtgtagcatgtcttcctcagcctctccccaccctagttttgaggcagagtctctcactgcccctggagttcactggcaagcagcgccccccgcccccctactctccaatgcctagctttttgtgggtccgggggttagaactcagctcctttgctcgagtggctggcacttcagcacctgagccccatgcagagatcaatttcggctattattattattattattgttatttcttctttatgctccccgttctcttatttttcttctctgtattactgtctcttcgccttgtttgaggatgcttttgttttcttgtttcaccatcttctggttaggaagtttgtttttctctgtgtttctggtttcttacctattcaagcatgttatctctttccttagaagaacaaacaaggctcccaaggctactgtgtatgggaagtgagctgtcacagcagccaacgccctgtgggagcctccctgatacccccctgccctgagctagccattgcctcaactcctgttaccacatagtcatggaacttgttttgaacttgaaataactaaattcatacaaacacaaaatggattcatacagttggtaagtctggccctcaggaagctccgcccctcagtattagtttattaatcacgtagagcccctggatagagagtgcttgccgggcacacgtggagccctggatttgatctccagagctgtgaagggtgtggtgatgcagtcctaacattcaggaggaggaagagcaagagattcagagtcatccttggctacatagtaaatttgaaaaatgtactaaggggctggtgagatggctctgcaggtgaaggcctttccttgacttcagtcctcagtacccaggaaacctaagctggccatgataacaaacacaagtaatcccacgtggaaggtggagcccagagggtcaggagttcagggttatcctcagcaaccttgagaatttactacttgggctcctgctttaattaattacttaattggtaccataaaaaacaggtatgtgtcgtgtactgctttacgctagctggttttagctgcttggtaacctcctgctgaaggtaaaacctctacaaagacttcaggcattgatgagagagcagagagcattgtgttggtagccagggctgggacattgtcaggacttagacagggagaggaaggtgccctgcttctagagtgtattggacggagcccagccatgaagtctagggagaagccaagtatagaactgctgcatccatctcccgggccagactgagactcgcttaagtgaggatgcatgggaggtttgggcagaacagctgaaggataatgcaggctgcaggaactgaccaggcaaagaaccccagtgaagcaggaagaccagtcggggactggtggggactggtggtgactggtggtggctgtggtgtgtgtatacacatcaccagtcagactcagaccacaatatgaaagtggaaagccacacaccctggctcacacttaaaatctcagcacttggggaactgaggcgggactgttaccatgagtttgagatcaatctggactacgacgtagtaagttctaggcccaccagagctagctagctacacggtgaaatcctgtctcaggggtggagggatggagggaacaggcaagaggggaggggagggaagagagaatgcagatacttgtgactttctggggcaagtgtgagggaaaagggcaagagtcagatgcctcagccagctggcgggaggctcagcaagtcaagtgtttgtcaccaaggctgaggatccacgttcaggacccagccaggatccacatggtgcagagagaaaaatggctcctgagagttgtcctctgaccttcatatgcaagcagtctgtgtgtgtgtataataataataatgccaataacataaaccccataataactagaatcaaatgtctcttactgtttggcctgacaaactcctctgtggtacagatcgtgtgtgtgtgtgtgtgtgtgtgtgtgtgtgtgtgtgtgtgtgtagatgggtggcatatatgtgtgcgtgctgtggtgctcatgtgaaggtcagagatatctccatgactgtcatcagcagagggtggctaagattccctgtggagcataagggagaaaggacagagagtctgtgtatcatctacccagcaggccaactaagggggaccatcatcacggtgaatgcatggagctggccggatagatcagcaggtgaaggcgttcgccgacaggcctgacgacctgagctcagtctcctgtcctcacacaatagaaggagagaattgactgccagagttgtcctctgatctccacacatacacacctaccctaccctcgtaatatgcgtttgtgtgtgcattattttgtttttcaagccagggtttctcggtagaccagactggccttgaactcagagatccacctgcctcctcctcctccggcgtgcaccacccccacctggcttagaatggcttgttttaaaaagtctccgtgggatggtctacttcccccctagggatcactcctggggttgcgggtgctcagcaagcactctacactgagcaacgtctctggctcttatttctcctggaacttgcagatacgtagataacttatttttaaagtactggaatatttgcttgcatgaagggaaatgtctaaagacaagggacccgagtaaactctcctgacccttcccttctccagagactggagtggaaagtctcttccagtgagacaacgtcagggtacccaaatggagatgggtgttgtccccccctgccttggactatcgagagagtctcttcccagcaggctgcatgagcctttactcactggtaaaggtcacgtgtgagtcttcaaggcttgacaagacttgacatttgcatttctctaagatttctctttggtgtgggtaatactaaagtagacaaggttaacactttgaccataaaactccagggcagagtgtagtatcccccatcccccctatcccaccccacnnnnnnnnnnnnnnnnnnnnnnnnnnnnnnnnnnnnnnnnnnnnnnnnnnnnnnnnnnnnnnnnnnnnnnnnnnnnnnnnnnnnnnnnnnnnnnnnnnnnnnnnnnnnnnnnnnnnnnnnnnnnnnnnnnnnnnnnnnnnnnnnnnnnnnnnnnnnnnnnnnnnnnnnnnnnnnnnnnnnnnnnnnnnnnnnnnnnnnnnnnnnnnnnnnnnnnnnnnnnnnnnnnnnnnnnnnnnnnnnnnnnnnnnnnnnnnnnnnnnnnnnnnnnnnnnnnnnnnnnnnnnnnnnnnnnnnnnnnnnnnnnnnnnnnnnnnnnnnnnnnnnnnnnnnnnnnnnnnnnnnnnnnnnnnnnncacttgggaggcagaggcaggtggatttctggatttctgagttcaaggccagcctggactacagagtaagttccaggacagccagagctacatagagaaaccctgtctcaaaaaacaaacaaacaaacaaataaatagtgtgtgtatacgtgtgtgtgtgtgtgtgtgtatatatatatacatatatatatataggcgaggaggtgtatgtgtgttagtgttttaatgctgtgaacagacaccatgaccaaggcaagtcttataaaggacatttaattaggactggctaacaggttcagaggttcagtccgttatcaccaaggtaggaacatggcagcatccaggcaggtatggtacaggcagatctgagagttctcagtcttcatctgaaggctgctgacaaaagactgacttccaggcagttaggatgagggtcctaaagcccacgcccacagtgacacacttactccaacaaggccacacccactgcaacaaggccacacccactaatggtgccactcagctggtcctgtgctcgcctgacaagcactaagcttaggttcagttcccagctagtcattaacccagcaggactatgaggagagcccttcaaccttatctctcagtttcccccttttatgtttaacgctggccctaaaatggaccagaccacccagagagctatgctgagtggaacgcagcccctggtccccctgagcatgctcaccactgtcctccacgggggacatgagtgtacacctggggactggctgactcagggaacttatttgccctaggtgtgtgtgcctacatgtacacacgtgtaaggtgtacaagtccacgtgcactcctgtgagcttgtccgagcatgcacgtgtaaaggacagagaccaacttctgctatcttcccctgcctctgtctggtttatttttgagatagggatcctcactgaactcggagcttgctgtatcagctaggccggctgctgcaagccctggggatccacccatttctgaatccccctggtcctggggtttcatgggagtcctgaggatagaaaatcaagccctcacacctccgtagtgggcaccctacccactctgacgtccccccagcccagccataggcctttgactcatctctgggcaaagtccctcatgctgtctcctggctgtgtagtgatgcgggaacccttactacatgacttaatacaaggttaatacagcctgccgcggcttttctcactccgtgagcaaggactgtttctagctacagcatcaccacacaaaattctttctaagcagaatctttagatggatgaatgaacacaagacctgaactctttttttttttttaaagatttatttatttattatatgtaagtacactgtagctgtcttcagacacaccagaagagggcatcagatctcactacgggtggttgtgagccaccatgtggttgctgggatttgaacttcggaccttcggaagagcagtcaggtgctcttacccactgagccatctcaccagcccaagacctgaactcttattaatgattaatttctatctctttcctctgatgttctggtattcaaagagtcgctatgatatgatttttggatctaatttaagagcagagatatcaaaattcctgtggctttgagaaactcatataaaatggggtgggtggggctgtcaagataataagagttcaggccattctctttgaatgggaaagggcagctgtctgctgggtatgcatctttgaatgcaatgacaggcggttttgatggtcagactagaagctgtgtctcagacatagattatgtcagagaaatgaagagtaggaggtaaaatgtttgtggatatttgcttattttctgaaacattaattactcagatagaatgttatgattttgctaagcagtaaactagtaccaataaaaagttattaaacagaatcaggcatggtggcacacaattttttatctcagcacttgagagggagaagcaggtggatctctgagttcgaggccagcctggtctacagagtaaattctgggacaactgggactacacaaagaaaccctgtcctgaaaaaagaaaagaaaaagaaaaagaaaaaaaaaaggggttaacatttttttctgtctaagggattaacattttgttctctcctcttccccactgtgttttatagtttaaagaagtcccagaaggccctatccctccgtctacacccaaatttgcatatggaaaagttgctctgagaaaggtaagacaggattcagggttggtagtgtggctcagtgggtagagtgcttacctggtatgaccgggtctatcctcagcaccatataaaccaggcatgctggcacacacctgtaatcccggcagtcaggaggatcagaagttcaaggccatccttaactacatagtgagttaggagctagcctgggctacataaaaccctgtctcgaaaagagataaaaagtcagatcctcacggagatgggcagacacggtgaatgggggtgtcatcggtcggctggaggcttgctctcttccctgagtttgttttctgagggccgggtggaagagttggcatttctaggggagatggaagagaggatgcttgtgcaagctggcaggatgcagggcgtggtgctcgtgggccgctccgttcattttagttcggttcttggttttgaaaggcagtgctttggacagccctggaatgacatcctatgtcataattctcgccagtcaggctctctcccgtcatttgcccctttattattatttttttctttattacatttatttcttggcttgggagacatgcattctgtggggctgagatggaggccagtgaacagcatgaagaagtgaatatttcttcttactgtgcatctggggactgggactcagggcatcaggaatggtgacaagcacccgctgaaccctcttgacagtcccatccaccccccttttttaatgagttcctccaagccacaggaattttgatacctctgttcttaaattagatccaaaaagcatatcatagtgatttttttggataccggaacatcagaggaaaaagatagaaattaatcatttaatatgagttcaggtaattttattctggggaggaaaggagagagttacttaatggtttacaaaattggtttgttttgactctttgggtctccggttttcccctagcttcaccctttactcctacgtgcattcattcaccagaaaaaaagagaagaaaacatgaatagccacttatttcttaagaatcttcaagttctaaaatagcagcataagcttttatctttaaggcaaacaccaaacaccatagcatagttttccatttgtaaccttgagcttctgcttggctggcccagctgccgtaatagtttccattgtagtgtcagatcctgtgccacattctacaaagaacgtggtctctgataggaatctcttcttagattaatcacgcttgaatctcacttggaagggggcacatgttcatctctgtagcgacttaagaaaaatggtcgcttggttctgaaacagccaagagtcttttcacgtgatataaatagctgcaaatgtttaaaacaacaacagtaccaaaattgaaaaacatgaagaagtacagcttagcgctatgaaggaaatcagcaaattggcatggtagctcatgccgataatactaactgtgggggctaaagcaggaggattgctgtcaaattcaaaagcagcctttactccatggtgagtccgaggctagcctggactttagagaaagattctgtctccagaagaaaggtgtggggaaaagcagaggtggttgttaatcccagcactctggagtggaggctggaggctgagacgttcagggtcatcttgaccacctagagagttctagcctgggctacaggagacactcgctgtctaataaactcgacacagagagctgggagggagggaatcggcacacagcttttttccatttatgtaagacatagtatataataaagttttatttaaaattgtatgtgtttgtgtgtgcactcgcacacttgtggggcagacagggtaactttcaggagccgtgacacaggctcagaacacctgccacataagcttgaaagacagtggagcaaccgtgacccaagcctgtgacagggttctggcagatctaatcttagagtgatttgcctctacctactatctttgcttcaaagctcttcctcacttgaaaacatgtgatgcttcgcagaggcctcctgtctcacgtgctgtccgttttgaggcctttcttagatagagagctctgagctgtctttctgaatgggtgcacttgaaactccccttaagacttctatcatttacatttttatcaagagttaggagcagggcctggagagatggctcagcagttaagaacactgattgctctggtttttttttaagttttgttatactttgtttgagacagggtttctctatacagtactgtgcatcctggatcttgatatgtagaccaggctagcctcaaagtcacagactgtacgcctgccttccaagtgctgagattaaagttgtgtgccaccatgcctggcttcgactgatcttcagaggatgcaggttagattcctagcaaccacatagcggctcacaagcatccgtgactccagttccaggttctgacgccctcttcttccctccttgggcactgtacgcacatggtgcacagacttacgtgcaaacacccgaacacgtaaaatagagaacaggtttaggacgtggttggcctttaatcccagcacttggaggtcaaggcaggtggatctctgtgagttcaaggccagtttggtctacatagcaagtcccaggccagccaggactacacagtaagaccctgtctccaaataaaataaaacaaaataaaaagttacaagcaaggcctggggctagccgctcggtggtacagaacttacttacccggtttgtgtggaaccccgggctcatagccgggcagggtggtgcatgcctctaattccaacacttgagaggctgaagcaggtcagtttttgtgaattcgagactcgtgggtgtatagagtgaattccaggatggctagggctgtcacgtagagaaaccctgtcttggaaggaaggaaggaaggaaggaaggaaggaaggaaggaaggaaggaaggaaggaaggaagaaaatgaaagaaaggaaggaaggaaggagaaaaaagaaaagaaaagaaaccgaccctgggttcaatccccaatcctgcagaaaacagtaagaaataaaagcaggtaggtgctaggttttagctgagttagcagagagcctgcctggcatgcagaaagccctgggtttgaaccccaacagtaagtacatagggtgtgtgtggttgaatgctcaggtaaccctagcacttggaagatcagaagagcaaggtcacatagcaagctggaggcctgcttgggacacatgagaacatgtctcagaaagaaagggagagagggagaaagggaggaagggtgagagagaggcagcaagagagacagagagagagaaagagacgggggtgggggtgggagaaaacagggagtgggtaagatcaaaggggatcgggaagcaaatggaacttggacagttgagacttctctcaatgtctttgttaagtcagactaatgtaacctccctcccacctgccactctggggacaggacactgagtctggttctgcttctttgcagttcaagacagtggctgaagctctgggtatcctgtgtcccaatgggccagtgaaaagcctctatcccctgacattcactcaggtaaaacaggtaggtctgtctccccggggagcgctctgtccttctgttcctggcaacacaggtgtgtcttactgcttcctgggcgtcgttatttaatggtggctgggagtagggctcagttggtgaggtacttgtctgtcatgagcaaaggcccgggttcaaaccccaacacctcataaaccaggcatggtgacagcctggagaattagcaggttggaggctcaggaactcaagctcattctcagatacatggtattcgaggccaacctgggctacatgagatcctgtctccaaaaaagaaaaataaagtcagttgtcagtttaagttttccttcttagaagttctgctttgggaagaacattgttgtgctctgtgtttgtgtgtgtgcttcatttcctggcgctttactttcttgtctcgctagaagtttctcgttcgaagctttttcaggattttacccagttcatccagttcatcagctagcagctgcttttcctgcccggtccatccacttcatcagctagcagctgcttttcctgctttgagtgtgtatgttgcggactgcttgtccccagaaaacagggctgagatcccaagcgtgacaaaggaaccaagagacccttggcatcccggtgacaccgtcccataccacacggggacccaagaggacatatctcctctgccgtgtccacacaaaaggcattctgctgactctagtgtgggaaggctagtcttggaacaatctggactcttcagaaactattgctgccagccggctgtggaggccacaagtatgattcctgcatgggggaggccaaggcgagagactagagaactggaggccagcctgggctacatagtaagctccaacctggcctgtggaacagggcagccttgtctcagaaaaacaaacatgagaaaaatcccacacaaaaattccagtgagatcacgaactggagacgagacttgaaaagagtttaagtggctggagagatggcgcaatagttaagagcgctggctgcttttctgaagaacctgggttcagttcccttcacccacgggggcagctcacgattgcctgtcactctagtaccgggctatccaaaacttctggccgctgtggacacctgcattcatgtgtacacacctaaacatgtacacacacacatacacatgcctcatacacgtgcctagcatggcatgaagccctgagcttaatccccaaaattacaaccagacatggttatatgacgcctcatcacttgggaggtggttgagggcagcctgggctacctgaatccctgtcttaaaaatcaataaatattactcctgatttggtggcagaacccacctaccccccaactctctctctctctctttcctctttgctttaaaaagagtttcaggttgagtcatgttttgtactctagagcagatttagcccaagaacctggaaaatgttttactgagcagaactcagtgtttgtcttgtgttcagggcttttcctggcttaaaaaaaaattttatgtgtatgagtgctttgcctgcttgtgtgtatgtgtactgtgcatgcctggttcctacagaagcctaaagaacttcagctgccctgaaactggagttacagatggttctgagctcagggcctctgcaagagcagcaagggctcttaatggcggagtcatctctccagacccctttaaagaaactattgttatctttatttatttattttgctgatgtgtatgtgtgtgtgtgtgtgtgtgtgtgcgcgcgtgtgccatcctgtgtgtcccagggaatgaactcaggtcataaggctttgtggcaagcacctttacccactgagccctctcaccagctcttgattttgtttaccagggacccctgacctgtaggcatgatttccctgggtccctctgggcactcttgttttcccagtgtggcagagtgctccttcatgtttgactagttctgccaagacctaacaagtcagcctgagtttggctgtgggtggaggaagcgtttcgttccctagagctttcagaacgttgctttcagccggattaagggcagccacgctctcagcagccgaacggtgagggtgatgctgatttctcatgttcttttctcaccagtattttggatatgtgctgtaccgaacaacgcttcctcaagattgcagtaacccgaaacccattttctcttcacccttcaatggcgtccgtgatcgggcttacgtctctgtggacggggtaagcattctctttgacctccacatctaagccttgacagaggggtggagggtcttctacacttaataacttgacagccagtgtccccgggcagtatggcttgcttgctgctatggcccacatgctgcagggtcagggctgttctgacacgcacactctagaaaaccctgggtctcatgagtccaaggccaacgctaccccgactgagcttagcatgtcacccaggccgcctctgctctttagggatagcatccatgtcagcttggtacatgttactatacaaaaggtgctgaacttagtgtctccccctaaatgaaacattagagtctcaagggttgctcatgacagttgtaactaaagtataccaagggcttcacttcatagtaaaatgcagatgtgtttttaaacaccctgtccaatatctggtgtgaggacacacgcctgtaatcccagctgtcagaaggttgaggcaagagaattgttaagattcaggccaacctgcctgcatgatgaaatccaggctttatcaaaacaacaaataaaggaagacctgagagccagagcccatgagatggctcagcacagtgcttgccaggagccctgtggttgagtttgatccctgggactgacgtggtaccaagcagagctgactcctgcaagctaacctccgacacccactcatgtgcctcggcccttgggtgcacacacagtaaactgaatcactcaaaaggtagctgtggccatttgctcctcattgggacagttgtgggaaaagctcacgagaagattttcctcaccaagcacattgtttcagaaaagtgttagccttggaggtttggtctttgaaacaggatttcatgcagcccaggttggcctcagacatgtttggtatccagggccagccttgaactcctggtctgcttaactctgcctcccaagtgctaggattacaggtgtgtgcagccacactcagagtagcttaaatcaaaaatatgtccattctaggctgggaagatagcttgccttgcaagcttaagagcctgagatcacatcagcagcccctctatagagaacaaagaaacaaggggctggagagatagctcactggctaagggcattggctgttcttccagaggacttgagctcaacttcaccacctacgtggcagctcacagctgtctgaaactctagtcctagaagatcctgacactcctggactctgagcaccaggcacagacatagtacacagtcatacatgcaggtgaaacactcacacgtaaaatacataaaagaataagacgaaaaaatccacgtgtgactgcgtgcagctgtaatctcagtgctggggaggcagggacaggaggagcctttgggagcctggccagccagccgagcctcctccgaaagttccaagagggccagagatcttatgtcagaaaggaagatggcccatttctgagggatgacaaccaatcctgtcccagtggtctctacacacgcacacatgcgtactttcacctgaacacacacacatacaataagggaggagggctttcttttataaccagcagatttcattttagtaggtacaagcccctgagaggtgacactgtgcctaccattacccagccttttttagttgtgtcctggtggcttacggtgagtgtagccagtctaaaaaataaccttttaaaacattaaaaataggggtggggggagggtatgggaggcttttgggataacattggaaatgtaaatgaagaaaatacctaataaataaaaaaatggatctcagaaaaaaaagtaataaaatataaagtcacaaataaaataaaaattaaaaaaaacgttaaaaatagggttggggattgagctctgtaacagagccctggttctggcctcaacttggggtgggtgtggtggtgtgaatgaaggaatgaataaatgaataaatagttagcaatgtcttgttgagaaaatacctgttgtttccctcactatgttacataatctctgtggctgaggtaccctagcagttgaggtgagctgaccccacctctctctgattttatctgtcccctgattttatctgtactctctacgtgtttcaaggctgtttccatgcacctaactgtgccaagtggagagctgtgaggagatgcagtgatccttctcacagggacgctagaatgtcttgtctgtcctgctcctttaaaatagaagtgtggggccacacctgtaagctgggcacgtgggatgtgaggcaggagaattagaagttccagggaggccctcatggtagaaggaaagaactgacttcctcaagttgtcctcaccatggtatacgcgcgcgcgcacacacatacacacacacacacacacacacacacacacacactcttaacaatgtaatatagccaggcagtagtggcgcacacctttgatcccaacacttgggaggcagaggcaggcagatttctgagttcaaggccagcctggtctacaaagtgagttccaggacagccagggctatacagaaaaaccctatctcaaaaaacaaaacaaaacaacaatgatatatatatagagagatatagatatactaataatgttatatatatatacatatatgtgtgtgtgtatacacacacacacacacacacacacacacacacatacgtatatatcaagcagtaaaatgcctgagccaagcatgttggtccatactagtaatcttagcatttataaggtggaatcaggaaggtttcaagttcaaggcaatcctgggctgtatcacaggcccttgttcctagaaaggagtctcagtcatcacaacacattcccagcagaggagtggcccctgagctgtgtccagccatcctcctcatttgggaagacagggattgtgggaacttgtcctgagcacatccagcctatccctgtacacctggtgacacttcggggcaggaaaggggacagatgagctgtgcacacagctccttttctctgatctcaccctccatcccctcggctttaactcacaggtcccccaaggaatccttgatcgaaacctcatgacagctctgaacatacgggggaaggctggagccacgctggacatcctggtggagaacatggggcgtgtgaactatggcagattcatcaatgacttcaaggtaggacacttggaggagggacgggcctgggcctgaaacactcacgcatctgactctgcttccatttatacagaaaaaaaatctttactttctatgtctaccaaggaatgcagtttattttccttatgtagaccaggcaggctggcctcgaactcagagatccacctgcctcttgtgttccaggtgctgggattaaaagcatgcaccaccatattagatctacacattaactaactttttaaatctgtttattctccttgttgttgttgaaggcagtctcaagtagcctaggctagccttgaactcaccatgactttgaattttcgatccttgagcctccaccccccaggtgctaggatcaccaatgtctgccaccatcctgtttacgcagtgctggacgttgagtccagagcctcttgtatcctgacagccgagtcacattctccagcccttaagtactgacagttgtatatgctatatatattatataacatattatatatatcaataactatattgatacttaagtatttaatagttaagactgggggtggatgtatatgtatgtatgtacgtatgtatgtgtgtatgtatgtattcattctgaccagtgaccacagaccagctgtcacacatcacagccgctccctttttttttttttttgttttttcgagacagggtttctctgtatagccctggctgtcctagaactcactttgtagaccaggctggcctcgaactcagaaatccacctgcctctgcctccggagtgctgggattaaaggcgtgcgccaccaccgcccggccagccgctccctttcaaggcctgcacacttcgctgagcctgaggagtgaagccccctgctttgttttgtagcctagaagatgactttctctgaagggctcttttcctcccctgcccacgagaaccttgagctttgcaaacaggacacttcccttgtgcttaagctcagtcgtcctgtggggagaaacggaagccacaccacccagctcgtccggggctctccctcctcggtacctgaggcatgtggtgggctctcctgtgcaggcttggaccggtggctgcaacaaagctgtgttatagaaagccccttggctgccatcctgccgccgccagttacttagtctctgtccagtcccagtgtggtattctaaccagtatttctagatcattaagaaagcttacattgttaatctgggtttctgtttagtttaacgtgtttaagaaagaaaaaaaaaaaaaaaaaacaactcatagcccaggctgggcagagactcactgtgtagacaggcagggatgtccttgaactcctaagcttcctgcctcgaccttccaagtgctgggcttacaggcatgttccactgcacccaggtcatgtggtgctggggcacaaacgagggcactaggcgagtcctactgagctgactccccagcctggaaactttttgttttttgagacaggtcttactttgtagccaaggctggtttagaactcacaacaatgcagattccgcgtttacagggccaacctccacacccagttcaagaaacatttgttttggttctgtagcgttcccaaggtgcttccctggagaaagagcacaaggcactgccaagcatcagatcgtgatcccgtttctatttttttgtaacatgtatgtctgtgtattcatatgtaagtatgtgtgtgtttgtgtatgtacgggcatgcatgtgtgttcgagcacatatgcacatgcctgccatgagtataaagggccagggttgacaactgacttctccctcaagcgatctccaccttctatcgaggcagggtcccaagtgagcctggagctctcatagccaacttgccctggggaattccctgttcctcctcttgtgtactgggatcacaggccgggctgtcatgcctacccagcattgatgtaggagctggggatccaagctccaggtctcactcttacgtagcaagcccttcacccactgatctgtttccccagccccttcctgatcctcttatgggcagcagcaaagccattgtggcacactgcttacacttgcctccgtgtaaatgtatttccgcacccttgtgttctggcttcggtcactgaccttcctggctgactgtggttggtcacattgactcccagggtgagtaggatcctgtggtgtggtccctgcgtccgggcacttcatactggccggatcagtaaacagttgagacttggtatcagagagtgccttttaaaaatccaggactcgctgagtgggaaagctccttacatagaaagtaaagaatcggtgaggcttgggcgcacacacacacacacacacacacacacacacacacacacacacacctacacctgtaatccccgcccctgtaaggtctgggctacacagcaagttccttctctcagcgaacaaataaaaaagccatagtgagaagtgagctgagttgccagaggcaacctgcagtccaatgctggaagcaggaagattttagagctcaaggctagccttggctacagagtgagttccaaaatcgtgtggaacacacggatccttctctcgataacaacagaaagaagttagatacatcacggtcctaagtttctgtgtgatgactgcagtcagggctgcctcagcccctagcccctgcaggtcaaatagggagaacttctcaaccaatcctggggtccattgtcatctcatcccttacagcctttgctcaatcccacagacttccacacacatggtcctcacagctggccagacgctcggccactctggatcaaggcttgctccttggttggtgtgaggggcagaggccaccccgcacccccctccatctgcataggataaatatccctagatctctctactcactccttctccccttccttgttagtctttgttttctcttcttcattctagcaaattctgaagtcagtggggttcaagctagagcgctccctcagaggcacccacttcctgtagcccagacactagggtgactttgtggtgatttgtggtgaagctggcgcatagggccgtgtacctcgttccaaagagttgccgttgtgggagttggtagggtcaggcagatccagagacagacgggacactgaaaggcagggagagccacccatgtggctactctaggaggagaagtaagtggaccctgtatcaccccatcttactccaccccaccccagtccgccctcaggatcccgacatggggttcaggtttaaatggacggctagagagagacactctagcagtcctagtaaagatgtgtcccagctccagtctctgcaaccagtgctctgaggaggtcagcactcagtgccagctctccctgagacaagctctcaggctggctctggatgataccaggctttgtctggcctttctttttcctagcatgagatttctagggaaattccatttccttaggttccattgactcaacagtctgccagccaaagtgggggagggtgggcataagtatctctttagatttcttcattctgggctggaagggtggctaggggtttagcacacttgtagaagatccaagcttagatgcaaagacccacatggagcagctcataactgcctgtaactccagctccagggcatctcatgccaaaaggtgctctcttggcatggtacccacatacatggacacacacacaccacatatacacatgctcacacacacacacccccacacaccccacacaagatcttatgccacaaataaaaataatttttttaaacttaaataaaaccaggcgtggtgacacatgcctttagtcccagcactcgggaggcagaggcaggtggatttctgagttggaggccagcctggtctacacagagaaaccctgtctcgaaaatccaaaaaaaaaaaaaacaaaacccttaaataaagagccaggtggtagcagcacactccttaaatctcagcacttgggaggcaaaggcaggcggatttttctgttggcttgagaccagtgtagtctatagaatgaataccaggacaaccagagctacacagagaaattctgtcttgaaaaaaaaaaacaaaacagacagacggaaggaatatcttcattcctgccaagacagtattggactgagcctccagccggacccgtgtcacctgctgtccacacagcagagtctcatttcctgctgcgtctcccaggaggtcagtgactcccacgagtccctgcttcacctgtggctcatggctctgtgtttcctttttccagggtttgatttccaacatgactatcaactccactgtcctcaccaactggacggtcttcccactggacactgaggccatggtacgcaaccatctctggggccgggaggccagtgatgagggtcaccttgacagacggtcgacctccaattcttcggacctcatactccccaccttttacgtgggcaacttctccatcccctcgggcatcccagacctgccacaggacaccttcatccagtttcctgggtggtccaaggtatgcatcttcatgaatagccttcgggttcaagcctcaagcattcggttctcagtactgagaaggaatcagaaggctgctagtaagatgctgtgtgatgtggggagggtttcctactggctcactcgtgcaggaacaagactgtggcagatcttcagggacccagtgtccagcttggaggggtccttctctgccccgttttccttgacaacttttcttcagtgaatggcagctcacttggcttcctccaggaagaactaggacctatttgttcatttttattacatttacttgtgtgtgtgtgtgtgtgttcaaatgtgggttttcatgtacctgccaaggcaaacgtggaggtcagagccatgagaatcagccttcttcctccaccatgtgtgtgggtcctggggatcgaactcgggtcattgagcttgttagcaagcaccctcagccatggagtcacccccccccccatccccagggcttctttatatgctgcttatgaagggaacagttttttgtctgcataggatttcatgtagcccaggctagccttgagtttgctaagtagccggaaatgaccttgaacttctggtgctcccgactctgctccaggtacacaccatcaggcccgacgagaaatggggcaaccgggctataagggcagaggaagaggagaggggagagagagagctggggtgtgagcagtcttcttacacgcctggcacacacctggcggcagatgatgatgtaagctgttgctaggttactgttgggtggaactgtagtcttctggttctcagagctctgagatgagtgctaactgcccaccttgggagagaggggcgccaccgggtgccccctgcttgttcgtgactgattaactctaagcaaacctcatactgtaaatggaccatagcaatttcattcttatagtagttccaggctgccctgggctgcaggaaaggctgtctcaaaacaaaacaaaaccgaacaaaaatgctagacccgttggtccatttgacgctcgtccgtcccttcccgccccccggaagtgaccatctttggcctcttggctgattcgtcatgtgccgaccacagtgaggcctctgctgtgcattgcccaccaccatgttctccacgtctaagctctgccttcctgggaagcctggtcctcctctgccctgtccctgggacctcatcctctctgcctgccgccagttggaactcctgtttcctggacttcctgtcaggttccgtcctcacttcctgcccagtggtctctagaaggaaggctccgttctgccttcttccccaaaaccaacccctcttctcactttctctgccggtggttcaccagcctttctctctcagcaggggctctcgggcctgagaacagatgcatccctgggtcttcccccgcagctagcaggggactttctgcctcctaggtcacctttggttttccccctgctgacaagaaggtgaagggtgctgtggccatcagaggcagctggctcttctttgtctgtgtgggctcccaagccaggcctttctcccagttctcatgccatgggatgtcctcttgttactccagtttagcacaaaatctcgggctttggtcacccagcctattagacttggccacccaaggtattgtgacaatcacaaagacaaaagagaccggagtgtggcttgatagagtgtgtccatgtatgtatatatgtatgtatgtatatatccatgtatatatatccatgtatgtatgaatccatgtatatatccatgtatgtatgcatgtatgtatgtatatatccatgtatatatatatgtatatatccatgtatatatgtatgaatccatgtatatatccatgtatgtaggtatgtatccatgtatgtttgctatacttgggctcagtcctcagcaccacataaaactgggtgaagtggtactgagcagcagcagaaggtggggagggggatcctagattcaagttgtcttcagccacatagcaagttcaagggcagcccgggctccaggagaccttgggttgacctctggcctgtttgtatgaacactgcaggagccatccaccctgtttctgttttgcttgcttggctttattttacttggtttattattactgtcattgtgtggatgacgtgtgtgtgtgtgtgtgtgtgtgtgtgtatgagcgtgacacggaaatctcaggtgacgtgtgcatgagtgtggtcataaaaatctcaagacagctgacatgtgtgagaaagatgagactttacaacgcgggagagcctcgggaacctccagccagtcaggcatggcggctcgccccagcacctaggaggccgcacagacagagacagaatcctgagggttcctggacagtcagtgagacagcttcaggtccagtggggacagtctgcctccaaaaggagggtgaagagtactggagagggctggggctggggctcagaggtgaagagcccctgctctggaggaccagggttctagtcccaagaaatctggtgccctcttctaaacctctgtgggcatcaggcacgaataagatgcacagacttggatccaggcaaaatatacccatgaaattcagtaatgataaggcagcagagggaggtactcaaagccaacttctggtctccatatacgtacaacaaatgcaacaaacaagcaaacgcctcccgacacgccctccatgaacacagataagtcaccccttcctgggcctcaccctgtgctgagcaacacttcagctgatggtttgggagaagaggaaagatttgaccacgtgacactgaggcctgagcagttctcagactaggttatgctcgctgacccttgtcttcctcctcctcagagccccttccctccccacagggctttcttttcttttgttaccaaggaactaacttgatctcgtgagtgaaatcactaatacattcagtccatgagataaaagcaccacttttgattgctctggtttttcttgggtcggatgtggctttctggttaagcaagtgtgcttgggggatttcaggggtcaggcgtgcctgctcagtccatacaggtcagtgcctgtctgcactgtgcaccgactgactgtagactctcagggaggcacgttcgccagggctttggtgacggtcagaacgttgggtcatgcgtgccacgtccagctatgctgggacaaaagcgtgttttctgcttatctccatctaagagaaatgagtgtggatgactatttcattaaactatcacaccaagctgtgcgtggtgtaatcccagcactcaggaagtagaggcaggcagatgtctgtgagttcaaagccagcctggtctgtacggtgagtctaagacagccagggccgcacaaagaaaccctgtctccaaaaatgcacatgaggtagaggaagatgcaggagaagttcaaggttcattctccagatgtgtatccaggtctgtctggaacccgtgaaattcttagcgtcataaaagaatgtggggctggagagatggctcagcagttaagagcactttctgctcttgcagagggcctaactttgattcccagcacctacctggtgtctcacagctgtctctgacctgcctggctcctgagtgtacatgatatgcatgaacacacacacacatttttgttcaggtttacttatttggttttgtgaggcagggtctcactatgaatccttggctggcttggctgggttacagggcatgtgccaccccacccagccaaataaatatttttaaatgatttatgataaggttaaggagctagctcattggtaaaagtgtttcctacatgtgacatctgggtgtaaatttaagcgtagcacagctgtaaaaagctacaaacggtggtggtggtggtggtggtggtggtgtttgcttgtagtcttagccttggagaagcagggagaggcagaatcctggagtgtgctggccggttagcctgtcctaactagcaagccctaggtaccagtgagcagtcctgtctcaaagcacagggtgaaaacccctgatgtcactcccaatgagtactggcagactatgactctgctgcttatcgtaccggggtgtgactgggtgttaactggctttaagctggaaactgagaagcccatgggtgtctgtcatcctacaagccactcccacagcgtggggcaggggtcagtgcattccctttgcctggtttgcaatggtgctaaccctacacagtcattctttacgtctaactcatagttttcactcacaaaccctgtgaacccagaaactaggtgattgggcttctcccagcaagtgcaataactccaggtgaagtgggttcactataatttttagtacacagagtttattttactgtgtatgtgtatgtgagaaacagacagacagacagactgaatgaatgaatgacacactatgatggctcatatgtttgtgtgcatgtgccctcatcacagggattcgtttctgatcttttatactctctttcacttcttggctctcaggtgagtcattttgctcaacctttcatgcctttttaaatttcacgtgtatgagtgtctgtctgcttataggtatatgtgtgcacaccacctgcatgcaggacccacagaggccagaagagggcgtcagatcccttggagttacaggcagttgtgagctaccgtgtgggtgctgggaacaaagcatagatccgctctaagaacagaggtactcttaactgctgaggcacattccagccctgtcctcttcatattggaaggttagagacagggccctggctattctttttttttttctttttaaccttcattttttttggtttttttttttgtttgtttgtttgttttcgagacagggtttctctgtgtagccctggctgtcctggaactcactctgtagaccaagctggcctcgaactcagaaatccacctgtctctgcctctccagtgctgagattaaataaagatgtagatgctacatttgtatttcttcatcttttaaagtttgatgcaagcttgtgtgtgtgtgtgtgtatgtattagagagaaagagagggtgggaggtacttttgcaacctgcctatggatttgaaagcttccagacctcttctttctctgagctgaatgccttgggtatttgttaggaaatagaaagttatcctagaatgcttcctaaaatacaggagaccacagagctgcttcatttattacactaagacctgggtaaatgggattcacaccatctgcagatagccatggggttgggagaggaggaaaagttaattccctttgcttatttcgggggctctgcttatagaccacttcaggtgctccttgacattttaccttatagaatcaagctttcaacctcacagcacaatgtagacaagtcatgagtgggagcatttgaaccttgaggacagacctccacgtttcccgatttgagccctccgagcacccatatttcctttagtatagtctattacctcgttgtctttgtgttttttaaacagggcctcactatgctgccctggctgtcccagaacttgttcaggagaccaggctgatcttgaacttaaaaatctacctgcctctgcctcccgtatgctgggactaaagggatgtgctaccatgatcaacctatattcacgtttaaggggcatctgaatatcttaaaacagtattgaggggtggatatggtggcgcaagcttttaatcccagcgcttggacggcagaggcagggagagttctgctttctgggccagcctggtctgttgagaccctatctcaaacaaagtaaaagacagtattgaaagtttaactctagggtctggagagatggctcagcagttaggtgcactggttgctcttccagaggacccaggttcaattcccagcaaccacgtggcagctcaccactataactctagttccagaagatctgatgccctcacacagacagacaggcaaaacaccaatgtgcatgaagtaaaaataaatttaaaaaagaaataaagcttcactgtaaattctaggaagattggctttgtccgggtaagttaaggcagacacacactcactgagaagtaggtcaggccctaacaggaacttccgctttgccgtcacctctgtgttaatagcagaaggtagaagtgtgggctggggtcatgatggtcagagatagtcgacttctgccatggactgtagaagttgggactgccatgggacacccccaagcccctgcagtcacctcattagtatatccttttggtttaccaagaataatgtaccaagaataatttcagcatatatttttctgtttggtctttagtggcagggtttcacactgtagcctagactagccaaatgtgctaagcaagagtcctttactaagctatactctcaactctttcagcataaattttacttatttttaaaattatttagttacttagttcagtttttccaaggcagcgtttctctttgtaacacgatagccagggctatgtagagaaaccctgtttcaataaataaataataagcaggttagtaaaaataaaaataaagaaagcctttaaaacttctagctggaagcctagtgtggtggtccacacttattaccgtagcactacagactcagaggctggggagtcactacaaattcaaggtcagcatgtctatatagcaagttccaagccagctggggctactagcaaaaccaaagaagaactaaaaccttaccctaaggccaatgaggtactttaaccccagcacttggggaggcagaggcaggtaggttgattgatctctgaggccagcctggtctacagagcaagttccaggacagccagggctatacagaaaccttgtcttggtggaaataatacatacaaacaaaaacaattaaaaagttttttaaaatgttgttgacagcactgttattaagaacacaaagctagaaacacctgagtacccattttcagtagtgaaggagtgagtagccatccgcatatttttctagggaatgcagtgtcgtggcagcacgcacaggccccgctttaatccctaacactgaagaaaaggcgggagcagggaacaatgtattagtcaggcatgctggcacatgcctgtagccccagcgtacaagagtccaaagtagagggattatgaatttgaggttatcctggactaacatataaaaaaaagaaaaaagtccccaaagctaattggtatatccgtaccattgaatgtcatatgtttaaaacaataatgcatatatacacttatttgtgcatgtatgtgtgtgagtgtatgtggtatgtgcatgtacatgtgtgctatgctcctgtgtacaggggaggaggtcagagaaatcaaagtgtcctgccctggctctccaccttacccccttgagacagactctctttctgaacctggagctgggctggagaccagtaagctcccgtggtcctctgtctcagtctcccacaacactggcattgcaggcatgggaaagacggcacctagctcatttatgtggttgctggggacttgaacgtgtgtcctcatgcttgcccggcatggctcttacccactgggccatcttcccagcctatttatgtacactggcacataggtaaaaattagtcaaaactaattcagggcaactgaaatcaggagctggtcttaagaccgtgaaaacaggattctggcagagatggggctgataaagcccaggtgaaactattatggtttatgcctttcaggacggagagagataacagatcccgagtaaaaacaagagttaaagtagttctgagaacctcgaaactgccacccttttctaaatgacttagtccaacagacaggcagttctgagtcgctgacctccttctgtgagcactgaacgcctagagcttttgtttcagtggtaagtggtgcccacactgaaccaggagtacagcccatctgcaccccactccttgcaccaggcactaggctgaccaccaaaatgtgctgtgcccccctagcacataattcataatcatctcctaccatagcctcccaagggctaaaattacagcacccaccccattcacccttgcttccatcttgggctgctttggggaccgttctcaaactacatggactctgtgttgccattgaccctgggagggggaaaattaaatggagacctgcctgagttcagacagctagcagcaggcaagaataagatgggaaaccaggaaagaaatccaggtggactggaataaagccaagggaagttttattatccctgcagtctcggcacttcagaggcagaggcaggaggattatctggactagatagttcaggctagtctgctgtacagaaagactgtgcaaatattaattgtttattttaaaatgagcaggaggggccgggcatggtggccagcattcgggaggcagaggcagatggatttctgagttcgaggccagcctggtctacagagtgagttccaggacagccagagctacacagagaaaccctgtctcgaaaaaccaaaaaaaacaaaaaaacaaaaaaaatgagcaggagggaccaccacgaggaccactctctttccttccttctctcctttcttgtcccctctgcccttgccctctagaacttccctcctcttccagatcttctgtttacctctggcatgtgtgaccccacaccacccccagcacccccagcagactattccatctgttctgtagcccctcgaaccctgagtgcgtcttttccagaagcagtgtccctgctcacaggagtcatccccacagcttgcaagactgaaaatcttgtcttccaagccattctccccacatccctcggaggaaagctacaagaaccacacacccaacaataatgtagacactctcctgtgtaggcctctgctcccatccccgtctcgtcccaccgctgtggcttacgcccactatattgcccaggctgccttcagactcagactgatcctcctaccgtagcctctcgcatgctgaggttgtagcacctgcggcacacgccctcacattcttcccgggttgtttgggaaacagttcttagactatgttcaggctttatgcacgtcaggcgacatggctgagctctgcctctgtggggcagagagcaaggaagactctcctgctggagggtgtgggcagccatagcagagagggttggggtacagacaggcagttcctgggagccagggtggatctcagaatgtgctgaggtgtggcccaagactggtctgtagcttctgaatctgaggctccaaaattcgtttcttctgcagcaggaattggtatttggaagaagctctaccacctaacatgggatactgggatgctggactctatggggcatctgttgcctctctgatactagtgttcctcagctgacaacctctctctctctctccctctttctctctctcttcctctctctccctctctctctctctctctctctctctctagggtcaagtatggatcaatggctttaacctcggccgatactggcccacaatgggcccacaaaagaccttgttcgtgccaaggaacatcctgaccacttcagccccaaacaacatcacagtgttggagctagagtttgcaccctgcagcgaggggaccccagagctgtgtacagtagagtttgttgacactccggtcatttcctgacctgacttgaccatcggtggccattttccaagccagtctggtcaagactcatggctgaacctctgagactgagccttggggagcacagctctactctggttacacggatcacctttgttgtgctagaatggaagctacatttctggaatgtgtgtaccctgctggtgactttgcagccccgccttgcctgacctcccaccctagtggccaccgggaaggctgaagggagtggacaccacaggaagacacaggttggagcaaaacttgaataatgtcctttatcctgatttgaaataatcacgtcatctttctgctgaataaaattggtttgcaagttgtgggggtcctgtcattaatatatcaggcaggtattaaactccagggtctgacttaaatctcaactagacctgagtgggctgcctgaagctacttcaccagcttgaggtacaaagtgggtagaagagagagctggtttgggtgagaagagggctttgtttttgatcctgctttgactatttctgaatctctgtgatatctgcttggtgagagatctccagttataaaccatctaaaagattaatagttgctcaaagtaggtagtatggtctctctatacaattgaatagaattctctctctctctctctctctctctctctctctctcctctctctgtgtgtgtgtgtgtgtgtgttcatgttcatgtatgtatgaagttgcatgtatatgcatgtatgtatgcaggtcagaggcccatcttgggtgtcatttctcaggaatgtcttagtatctaggcacatacaggatgtataaaatgtaattctgcttatgtttgagaccctgtctccaaaaaaaaaaagtgttaacgtggggctggtctgtagctaagttgataaaacacgtttgtttgtcatgcaagaagcactgggttctctccctagcagtgcacaaaaccaggcatgatagtacatgttgtggttataaaaagataaagaggtctaagaacatgttctatgggggtgtggtgannnnnnnnnnnnnnnnnnnnatagtatagaatagagtttatttagggcatggggaggggagctaagatggtagtagagacagagagagggagagagtagagaagtagaggctggccaggacaaagtgaagagagggggaaaggggatggggagagggggaacaagggagcaagaggcaagagagtaagagagagaggagggggcaagcagcctacctgggttttgctaggtaactgtggggtggagtttagacagaatgctaacagtacacacacgtgtaatagcattcaagaagtgagaggagagcactgaagtccaagtttatcctcagctacacagcggggtccgtaccttgtgttatatgtaaccctgtctcaaaaaaataataatatgattgcatctgagtggtaaacatttgggtacttggctacatttcctaacctatactttaaatttggaggaagggaacaagtgtgcgcacacactagaagtttccagccccacccccacccccgtctcccactcccacgggagcactgggattacacttgtgcacactattgttttaagcttttacatggctaccagaggtccaagctcaagtcctcatgcttgcttgggaagtgccgtcaaccaccgagccacctccacatctggcttttgtttcagtttttatgtatatgagtactgtatttgcatgtctgcctgtatgatgaaagagggcatcagatcccaatatggttgtgagccaccatgtggggtctggggattgaactctggacctctggaagagcagctggtgctcttaacccctgagccaacctccagccctgttttgtttttttgaaacagttccagagctgcctttgagctcatcatgtagccaaggatagcctttaatttctgatccttcttacaaacatgcaccgcacgcctttaatcccagcactcgggaggcagaggcaggcagatttctgagttcgaggccagcctggtctacaaagtgagttccaggacagccagggctatacagaggaagcctgtctcgaaaaacaaaacaaaaacaaaaaaaaaaaaaaaaaagcttttccattcttagactctgatgggaagggagcccagggcttcatgcatgttggacatttgactgacagagctacatccccatccccaggcctttactccattgtctaatgtcactttctgtttgtcagtctgtccatatttgtttctcggtaattctagtttacttgaaatgaaatcgcttagccctcagtctcctgtcaagtgactgggacagcagatgatctcccatgctctttatttctttcttcttatgaaaaaataaaaggtcattttctgaaatcatttcttagtcactgtgagggatctaagctgtggtacaataccacatgtgggctataggaacgtaaagtgactgtccagagagtgggaggggacacgctggctctaggcaactgtgttccagcccctgagtgtcagagcttcctctcagcttcccttgcccctctggctgactggaaacttgcactgaggtttctacactttgatttttcaagacagggtttctctgtgtagccctggctgttctggcactcactctgtagaccaggctggcctcagattcacagagaccgcttgcctctgcctcctgagcaccaggatcaaaggcgtgtgccaccactgcctaccacatggctcagttgatgaagtgtttgcctggcaagagtgaggccctgggttccaccccccctcactgaagaaacaaggtatggccaagcacatgggtaatcctagcactctaaagtggaggctggaagctcacgatcagagcaagttccaggtcagaatacaagtaacagtactgctaatagttcggactttgtgatggaaactcaagttagtctctccctcgccctctctctctcatcattgttggcaagaaagtgacttgctcatacgccttggtttcctcaagtgtggctcccacttgggctttctcagttgcgtcaagcctagaagtatcctggctagcacctgccacggagcatgctctagtttcgtttctgctcttgtgtgagcaccctggccaaaaaaaacagcttcggggagaaaggacttgttttaactcacaatttcgccaggcaatgatggcacatgcctttaaccccagaacttgggaggcagaagcaggtggatttctgagttcgaggccagcctggtctacagaatgagttccaggacagccagggctgtacagagaaaccctgtctcgaaacaaaacaaaacaaacaaacaaaaaaaaaaaaaaaaaaaaccctcacgattttactggtgaacgtggcaggagccggaagctagtcagcggtattcgatggtcacaagcagataagtgataagggcacaagagctcgcttgcttgctgacttatgcttagctcaagcttgactctctgtgctgtttgaggccccctgcccagggaatggtgccacccacagtgggctgtgtctccccatatcaactacttaagacagtccaccatagacacaccaaggctaacagcgtagactcctcctcactaagacatccctccaatggttctactctgggtctagttgacaaagctaaacaccacacacatattcattgacactttcgatcaagtccccaccctcgcagagaagccaaaggggtggggaaagtgatgccacccaagatggttctctgtagccctctgtgttcagttcagccactcggtgctactctgccactgtgctagactcaggctactaagcaaataaacttgtctgtgatgagccgtgctacacactaaggactagaggctgagggaatggcagcatccaaagggatcctctagccatgacctgggagccaccgtggacactcagcctgtagaaaaggctacaggcccccaatggcgtaagcctaagaggatggactggccccaaccctcacctggagaacgcaggagagctggccctggtggcatgggccctggagagctggtgagctgacccaatcagtccagatccaggtctttgagttggcccaacccaacatctacccatctatgtatgagctgctggagagaaggaaggggccagtcctgcagatggaaaactgtggggtctccatgacacaggacagcagcaggatagccaagaggtgtcccagtgaggagccacgattgatggtgcagcagaagtcagaggcctcaaaccagctcgatgactccttgcaagtaaagctctctgagcaaaaggctgtactgtgtgacatcctgcaacacatggcagcttccacagtgtcttggtggggaggtggcaagggcagagggcagatacagagggagatgagggggatttgggtgcatgatgtgaaagtcatgacaaatcaataaaaagatttttttggttttgttctgttttgttttgttttaaatggctccaagcccaggattggcctccagggctacagtctgtgtctcttccgggttctggttccttaaaaaccactgtgctgtgttctccagcagcaggagtgactttctgtttccaataccatgattttgcatgcccccgtcccctcgtcagccactctgatggtgtctgttgctgtgtgacatggcaacactgtcagctggaaatggtaactcaactacccttctcttgtttttaaaacagggtctcatgtagcccaagctggcctcaagttcactatgtagctaagggtgacattcaacttctgacctccctgcctctctcctcccaagagcccgaatgacagccgtgaactaccacgcttattcatgcagtgctgggaatgggacccagggtttgtatgcaagctagacaaggtgtctgccggctgagccacaaccaacagataaaatggccagcccaagaggggctcttcttcttttttcttttgttcatttgtttgttttgagatagggtctgtgcataaccttggctgtcctggaactcaaagagaactcttcctctgcctctaaccctgaccctgagtgctgggattaaaggcctgcaccaccaccacacctgacaatagcgggtatttttaaaaaccgctaatagtactcagttgcaatccttttgtatgtctgtctatttcacaagatgtttaagactctgaattgagtcctgctcatttttggtccagccccatcagcaaagtacagggcttgattaccctaggttcacctggcctgtatttaatatcaaggactccttgggccatttcagcttgtcttggtccctagtgaacccaacagaaggaagtaggagggctagagaccttgagcacaggctaggaacgtaccctgtgagccccacaccagcctgtgcgccgtgtgtgtgagaagcttgatctctgcttcttattggtgagatctttcagtcagagctccgagggttcactcaggtgctgtccaaccttgcacttcccttctgctttgaattttactaagcaaagagactttgtgtccgggggtgctgtaatgtctgtcctgtcccctttcctgtggactctggacttatcaactattggaagaaataaaagttgaagggcttgggtcttagctctggagcccatgtgatggcacgtgcttctaatcccagcatttggggagggaaggcaggagggtcagaagaagctcagggtcgtccttggctacatagaaagttcaaggccaccctgggctacatcgtgatctcttgtctctgaaatgaataaataaaactgtgtgtgggtggctcacacctgtgatcccggcactgggaaggccaaagcaagaaggttcccaccccttcaagtgatgtttagttcctgtatctgtggtacctggtagagcacatctagcccatagtaggtcctcagccaatgcctactggctggataagtaagtgcctgcacgcctggatgcctatatacacactgagagcatagggtccctgtgacaccaccagtccctcaggtgtgtctgagccacccacacagtttttatttattcatttcatcttcttgaaagatccaagatttcatttaaaaaaaaaaacattttgtttaaaaaaccttcccacagagggcttgctttcctgctgtttcttctggctagacggtctatcttcttccaaacagattcagttcatgaaagacagagccatcccacacagtcttgtaaagtatcatgactcaaatgtggagcggtgcgtcttgagctccacacaccgtcaaccacactggacctcgttaacctgtaagcatacagaaatcttgagtttgtagcatccatccaccctgagcctgtacaaatgcaataacactgaatgggacatagcagttttgttccctctttctctgtggggtgtgtgtgtgtgtgtgtgtgtgtgtgtgtgtgtgtgtgtgtgtgagacagtgtttcatgtagcccaggctggccttaaactcactctgaagtcaaggatacccttgaacttctggttctgcatctaaagtccctaaagtcctagaattgttgagtgagccatcgtgtatcctatgtccagcactaggaatcccagggtctcattcgtgccaggcaagcgctctagcaacaagctccattcccagcctgatacctcagtctttacaagtcctccctcccttcgccttctttgtccactctgacctccacatctctggtcattttcaaactaagcatggcccatctgtgttcctgaaagatacatgctgtcctttcaaggtccagggccttaggatatggggctttgggaggcaagtggcttctggagtcagaagggagcagcagccagggtgtggtggctcgtactgacaatcctagcagtgtggagacaggcaggcagatctgtggagcccacagagagcctactcaggaagttccagcctagtcacacacagacatgcacagacacacacacacacacacacacacacctgtctcaaagaacaaagcaggcacagtaaggtgactcaggcagagacacttttgccaccaggtctgacaacctgagtttgttctctgggacccaaggtagaagaagagaatcgactctagcaagttgtcctctgagctcacgtgtatgctgtgttgtggtccagacacacacacacacacacacacacacacaagcaatttattttaaaaactttaattttttttattttaaattatgtgtatgtgtcggtgtccatgggtatgtgcaggtgactacaggtgaccaaagaggccagatgaggacatcagatatcctagaaatggagtcgcaggcagttgtgagcccctctgctttctggttgtagaaactaaacttggatcctgaggtttatctccagccctgctgaaaaatattttctatttgaggacagtcaaggctacacaaagaaaccctgtctccaacaacaaacaacaaaatgttaaaggaagatggctgacctaaggaacacaggaggctccaatctccacacacatgggcacatacacacatcttcatcacatgtacacatgtacctgtgcacatgaacacacagagaaatacacacgttaggggttgatgaccgtcactagtggtctgagccatctcatccttcggggtaaaactcttcaggtaggagaacccagaagagaggtttagggtctgagccaccaccctcagtgccaagcccgaagaggaaagacaccccagagttcccctcatggtgcaggctcaggggtagtcaatatgcattgacttagtgtatgaatcaggccaccttcacgttcaagtggactggacacagaatggagagaggaggcaagctttccatgccacccagagcacagcaacgagaaggccttaagtagccagcccagcgacatcttctgaagccacagattcgaccaggagaaatctaagcatttcccatgtcccaagactgcagatctgagtacaaagtggccctgtggcctggggagatggctcagcagggaaagtgtcatgcaagcaagaagatctgcatttcaaccccagcacccacacaagaaagccaggcctggcagcctgcaccttaacccaagtcatggggagatccttggggctctccagccaaccagcctagcctgcttaatgacttccaggtcagtgagagagaccctgtctcaaaaatgtatggacccccaggtctacagctgtatatacacacacacacaggcatatgcccaaactggtcctggggaaagccagcattgagagtagatccattccacaactcagtgatatcaacagataacaaggccgggcagtgggtgcacgcctttaatcccagcgcttgggaggcagaggcaggtggatttctgagttcgaggccagcctggtctacaaagtgagtaccaggatagtcagggctatacaaagaaaccctgtctcaaacacacacacacacacacacacacacacacacacacaaagccactctttcaaaattgcagtgtctgcagggcccaggggccgtgggtgagaaactgttaaactgccttcggaaggactggaggtacggcgggtgacataggaactgagctcagctttagatgggaagtttaccgctaacacctgcacatnnnnnnnnnnnnnnnnnnnnnnnnnnnnnnnnnnnnnnnnnnnnnnnnnnnnnnnnnnnnnnnnnnnnnnnnnnnnnnnnnnnnnnnnnnnnactcctgctgtaacagatgctctttggtcttctgctcattattttttttttgttgggttttgttttttctgtcttttgttttctgagacagtgtttctctgtgtagtcctggctatcctggaactcactctgtagaccaggctggctttgaactcagagatctgcctcctgagtgctgggatcaaaggcatgctccacaactgcccggttctgcttgctgttaacaggtgtctttcttagcctaagtcagcctacctacctaaaagcgttttccacactgttctatttaagtgaacccatgtcttaattgcctctcttggctgctgctgtataattacacttctcccttggggtgcgagtttggggttggatatttcttttgcacatgtgacctcctatgctttgtttactaagatctctttccttcccctcctctctctcatcccctccacagcagtttctaggtggcccctggattggatgttcttagtgtctaagatggttaacttgcctgaatgtagagtcaccatggaaacatagctctggatatgtctataggctgttttcagagagttttacctgagggaggaagacctcccaccctgagtgtgggctgtaccactctatgggctgcagtccctgaaggaatataaagggttctgccttcctccttttccctgactgcagatacggtgtgaccagctgcctcccacccggctgcctttctctaccctcaaactgtgagccggtataatccctcctgcgtaggtcaagcctcttacacaacaaggagagaagcaaacgcagtcctaccagagacctttactgtgcatgcaaggtcctccagctcctgcagagacagatcctcctgccctcgaagctactatttgaatacctgaggcaggaggattgcctcaagttcaacaccagactaagtgcaaggtcagtctgggttgtttgcataagtgagaacctgttccaaaaatccacctggggttgatgagatggctcagcaggtgaaggggcttgctgcagatcccgatggatgacctgagttcaatccccaattcccatgtggtgaaaggagagaaccagcctcttttaagttgtcccctaacttcttttccttttttttgttttgtttgtttttgtttttgttgttgttggttttttgtttttggttttggtttttgtttttcgagacagggtttctctgtatagccctggctgtcctggaactcactttgtagaccaggctggcctcgaactcagaaatccgcctgcctctgcctcctgacgagtgctgggatcaaaagcatgcgccaccacgcccggctgtcctctaacttctacacgtgctctgcgacagatgtgtcgcacaaaaacaaacaaacaaacgaaacaataaataaatacattaaaaaagttaaattttttttaaattaaaaaacaagcagccaacagtcaagcaaggtaaagcccacctttaatcgcagcgctcaggaggcagaagcaggaggatctctgagttcagagcagcctggtctacgtagtgaaattccagcagccagggctacatagagagacattggctcaaacaaaacacccctgttggctccctgcaaggaggctctgctgagggggccctgaaaggtcagacctttgcatgcagatgggatctgctgtccaggacccgttagagaggagatcgtggctctgtgtcttccccctcccgtgttccttttcctcccgtcctccaaggagcagcccagaagtacttagactgtgcattgatttcttctctcggtgaccaagcacccgacaaggcacagctcgtggctggaattgagctcagaggcggcagcttcctggcctggcatgcacacgtccttaggtttgctctccagaactgcaaagaaactcagcagcgaggaaaagcaactcgatgtatgaagaattcactttgggtcatgctttaaagggctagagcccatcttggcagaagagacatggcagggcttggttgactatggccagaacttcagctcctcac

SEQ ID NO: 1157 - DNA, 2864 bp, Mus musculus
aacaacccccggaggtgcagcggctggccagagcgcccactgcctaacggagagaccccatcgtggcgcgatcatgctccgggtccccctgtgtacgccgctcccgctcctggcactgctgcaactgctgggcgctgcgcacggcatctataatgtcacccagaggacatttaagctcgactacagccgggaccgcttcctcaaggatggacagccattccgatacatctcgggaagcattcattacttccggataccccgcttctactgggaggaccggctgctgaagatgaagatggctgggctgaatgctatccagatgtacgtgccctggaacttccatgaaccccaaccaggacaatatgagttttctggggaccgtgatgtggagcatttcatccagctggctcatgagctgggactcctggtgatcctgaggcctgggccctacatctgtgcagagtgggacatggggggcttacctgcttggctactagagaaacaatctatcgttctccggtcttctgacccagattaccttgtagctgtggataaatggctggcagtccttctgcccaagatgaagcccctgctctaccagaacggaggaccgatcataaccgtgcaggttgagaatgagtacgggtcctactttgcctgcgattacgactacctacgcttcctggtgcaccgcttccgctaccatctgggtaatgacgtcattctcttcaccaccgacggagcaagtgaaaaaatgctgaagtgtgggaccctgcaggacctgtacgccacagtggattttggaacaggcaacaatatcacacaagctttcctggtccagaggaagtttgaacctaaaggacctttgatcaattctgagttctatactggctggctagaccactggggtaaaccccattccacggtgaaaactaaaacactggctacctccctctataacctgcttgcccgtggggccaacgtgaacttgtacatgtttataggtgggaccaattttgcctattggaatggtgccaacacgccctatgagccacagcccaccagctatgactacgacgccccactgagcgaggctggggacctcactaagaagtattttgctcttcgagaagtcattcagatgtttaaagaagtcccagaaggccctatccctccgtctacacccaaatttgcatatggaaaagttgctctgagaaagttcaagacagtggctgaagctctgggtatcctgtgtcccaatgggccagtgaaaagcctctatcccctgacattcactcaggtaaaacagtattttggatatgtgctgtaccgaacaacgcttcctcaagattgcagtaacccgaaacccattttctcttcacccttcaatggcgtccgtgatcgggcttacgtctctgtggacggggtcccccaaggaatccttgatcgaaacctcatgacagctctgaacatacgggggaaggctggagccacgctggacatcctggtggagaacatggggcgtgtgaactatggcagattcatcaatgacttcaagggtttgatttccaacatgactatcaactccactgtcctcaccaactggacggtcttcccactggacactgaggccatggtacgcaaccatctctggggccgggaggccagtgatgagggtcaccttgacagacggtcgacctccaattcttcggacctcatactccccaccttttacgtgggcaacttctccatcccctcgggcatcccagacctgccacaggacaccttcatccagtttcctgggtggtccaagggtcaagtatggatcaatggctttaacctcggccgatactggcccacaatgggcccacaaaagaccttgttcgtgccaaggaacatcctgaccacttcagccccaaacaacatcacagtgttggagctagagtttgcaccctgcagcgaggggaccccagagctgtgtacagtagagtttgttgacactccggtcatttcctgacctgacttgaccatcggtggccattttccaagccagtctggtcaagactcatggctgaacctctgagactgagccttggggagcacagctctactctggttacacggatcacctttgttgtgctagaatggaagctacatttctggaatgtgtgtaccctgctggtgactttgcagccccgccttgcctgacctcccaccctagtggccaccgggaaggctgaagggagtggacaccacaggaagacacaggttggagcaaaacttgaataatgtcctttatcctgatttgaaataatcacgtcatctttctgctgaataaaattggtttgcaagttgtgggggtcctgtcattaatatatcaggcaggtattaaactccagggtctgacttaaatctcaactagacctgagtgggctgcctgaagctacttcaccagcttgaggtacaaagtgggtagaagagagagctggtttgggtgagaagagggctttgtttttgatcctgctttgactatttctgaatctctgtgatatctgcttggtgagagatctccagttataaaccatctaaaagattaatagttgctcaaagtaggtagtatggtctctctatacaattgaatagaattctctctctctctctctctctctctctctctctctcctctctctgtgtgtgtgtgtgtgtgtgttcatgttcatgtatgtatgaagttgcatgtatatgcatgtatgtatgcaggtcagaggcccatcttgggtgtcatttctcaggaatgtcttagtatctaggcacatacaggatgtataaaatgtaattctgcttatgtttgagaccctgtctcc

SEQ ID NO: 1158 - protein, 641 aa, Mus musculus
MLRVPLCTPLPLLALLQLLGAAHGIYNVTQRTFKLDYSRDRFLKDGQPFRYISGSIHYFRIPRFYWEDRLLKMKMAQAIQMYVPWNFHEPQPGQYEFSGDRDVEHFIQLAHELGLLVILRPGPYICAEWDMGGLPAWLLEKQSIVLRSSDPDYLVAVDKWLAVLLPKMKPLLYQNGGPIITVQVENEYGSYFACDYDYLRFLVHRFRYHLGNDVILFTTDGASEKMLKCGTLQDLYATVDFGTGNNITQAFLVQRKFEPKGPLINSEFYTGWLDHWGKPHSTVKTKTLATSLYNLLRANVNLYMFIGGTNFAYWNGANTPYEPQPTSYDYDAPLSEAGDLTKKYFALREVIQMFKEVPEGPIPPSTPKFAYGKVRKFKTVAEALGILCPNGPVKSLYPLTFTQVKQYFGYVLYRTTLPQDCSNPKPIFSSPFNGVRDRAYVSVDGVPQGILDRNLMTALNIRGKAGATLDILVENMGRVNYGRFINDFKGLISNMTINSTVLTNWTVFPLDTEAMVRNHLWGREASDEGHLDRRSTSNSSDLILPTFYVGNFSIPSGIPDLPQDTFIQFPGWSKGQVWINGFNLGRYWPTMGPQKTLFVPRNILTTSAPNNITVLELEFAPCSEGTPELCTVEFVDTPVIS

SEQ ID NO: 1159 - DNA, 121033 bp, Homo sapiens
  misc_feature (1)...(121033): n = A,T,C or G
gaactcctgacttcaggtgatccacccacctcagcctcccaaagtgttgggattacaggtgtgagccaccatgcctagccaattcaacagaatttgtaaaaggaaatgaaaccagatgtctagtgtggctgccttctgcttgagtggctggttagcctcattagagctttgtctaagggtgtctcctcaccaaagaaggcaatgttcccccaggtgacttaagtgacaaattctcttttatatcgtgaatttattcattctttcagtacactgttcagcatctaccttttaccaggtcctgcacttggtgctgaaatgcaaagatgaaacagacatacttccttgactgtgtagtagaggaaatgcaatatttatttattgtttcatttgttacataaacctatagcgaattgtattccagatgctatattaaagaaatgatatcaacttttgcctcagagaactcaaaattaggaaatgacagataagtaaacctttaatcaccctactgatggagctggaatagagatgtggacagagtacttgtggggaccccaaagagggctgggtaacctagtctgaaggtgagtctggaatggcttttccaagcggccatgcttgaattcctttaaagaatatgaaaagatagaatagaagttgactggagacaaaaatggaaaaggaagaagtctgttggcagagggcacaacatatgcaaaggcttatggggaagagagtgttgggcctgggagccataaagcagtatgggagactcctgaagtgattcccacaagaaatgggagggcccgaattgaagcacagaatataaagacccataacacagataaagaaaaaagataaatgtcaaaagttaggccaagcacggtggctcacacctgtaatcccagcactttgggaggccgaggcaggtggatcacctgaggtcaggagttcaagaccagcctggccaacatggtgaaaccctgtctctactaaaaatacaaaaattagccgggtgtggtggtgggcgcctgtaatcccagctatatgaaaggctgaggcaggagaattgcttgaacccaggaggccgaggttgcagtgagctgagatcactccattgcactccagccagggtgacagagtaagactctatctcaaaaaaataaataattaattaaataaataaatgtcaaaagttagatgtatgtagaacgctacgagaatttctggaaggaaagaactcctttagctagttcaatcagtgattacttcattttaaaaaaggcattaggtctgggatttgaattggggatgagctataaacccataatccttaaaacaaaatctaacagacttccccaaaaccctaggttggagaaagctcaggaagtgcataggttggagaaagctcaaatagttcatcatgttgagcaactgattatctcatcttgaactctctagaaaacagagcctgtggcaagaactaaatactaatcctgtatttgggaggtacagtgcacgacagtgacaatgagaagaaagggaaatgaggcaggaaaggaggagaagtggtgccaggtagtgagttactgtgcaggctagtgcttcatgccagccttaaagacacggagacagtttgttggcaggtgcacccactataccatgtggaatgtctctggtcagagaaaccacatcttgaaatagttcagcagaggggggaaggcagaggaaatttatttattggctcatctctggtcttccactgcactgggcttctccatgtgggagttaacttacctgcccttgtgggtaccaccacctagctagcgtctttggcagccacttgggaagcatggtgcctcattccagtgagtccagaagagtctggaggagccagagactccagatggttggctttgggtggcatatgtgctgcagcagtagctatggtagagaggcagctgagagttcaggagaaaggtgactagagaatctaggcatcatagagtatgtcgtatacagtaatcatggaggttcgaccaaattaccactgagactctgacccagaagttgcaaatgtcagtttattctaccttggggcccactgcagttcatgtcaaacaaaaggcaaaccaaagctaggtgtgatggctcacacctgtaatgtcagtgttttgggaggctaaggtgagaggattgcttgaggccaggagctcaagaccagcctgggcaacatagcaagaccctatctctacaaataaaacaaaaattaaaaaaaatttaaaaagcgcatatctgtagtcctagctactcaggagtatctcttgtgcccaggagttcaaggctgcagtgagctatgattgcactacagcctgggcaacagagtgagaccctgtccctacccaaaaaaaaaaaaaaaaaaaaaagaaagaagtgaatcagatggagagggctgccaactggagagacatattctgcctaaggaatgtcccaactcatatctctggagtactgttacctcatgggatcttgggcctggcgtggccagaccttctgatctttgaagagaaactggaaatccatattatgtaaattcccctgattaaatgttgacaactactgtaattaaataaaatcaaacacactggtgggtcaacacggacagtgtcaaatcaaatagcttttctggccacatctagttttaaccttcaatctagctagaaaactactatgatcattcacagaaggagggaaccacaactgcaggcatggctacaaaaacaaagagggtgggctagctccaggggtccaggtgaagaagaaatgacaggctttggtggtagattagacatgagggggaaaaaagaaacagaataaagaaataggctgggtgcggtggctcatgcctgtaatcccaacactttaggaggctgaggtgggtggatcacctgaggtcaggagtttgagaccagcctggccaacatggtaaaaccccgtctctactgaaaatacaaaaattagccaggcatggtggtgtgcacctgtaatcccagctactcaggaggctgaggcacgggaatcgcttgaacctgggaggtagaggttgcagtgagctgagatcgcaccactgtaccccagcctgggcaacagagtgagactccatctcgaaaaagaaaaagaaaaagaaaaaacaaacctgcaaagatgcatctgagagactctggggagcagatgcccatgacaggaaggtgacagacagaagacaggagagaagaatgtttgaagcaacatctttttttttcttaaggcaggcctcacttgaggcattttatgttttcagatatctcagactcccagagggtaagcatggggaaaaagtcatctcaaaacccgtgactaccataaggcatagtcctgtacctcatcacagctatcaatttttattaggaactgtagagaaactgttggctgatgatttcacaatttttttgttgttgtttcataaccatacccatcaaattggttgcacgacttaaccccaggacaagttaggtttcaggactttttgcatcagaaagctcaaagacgtgtgaggaggctaaggaattgctgcacagcagaattgcccacatttgtaggccagagacctcgttattttcagttttttaaataacttctaattttgacttaagaattattgtatgctgtttacctacttcatcaattgttaacattttgctttatttgctctatcacttggtctcccaccattttcatgtaaggtacatgtgtattatgtgtaatatataattatatgtatggaagtataaacatattattatagttatcatatgagaataaggtgtagacattatgctcctttttttttgagatggggtcttgctatgttgcccaggctaaagtgcagcagctattcacaggctcagtcccactactgatcagcatgggagttttgaccttcttggtttccaaccttggccaattcacccctccttaggcaacctggtggtcccctgttcccaggaggtcaccatatttatgccaaacttagtgtggacacccaatcggcatagcgcactacagcccagaactcctggactcaagcaatcctcctgcctcagcctcccgagtagctgggagtacaggcgtgcaacaccacacctggcaacataatgctcctttactcctgtgtaattctgggtgtatttccaaagaacatggccacaatatcacttatcgaaaatagaaaatttaatattgaaacaatattattttctcatccatagcctatattcaacttttgttaattttcccaataatgctcttaccgattttttttcccctggtctaagatccagtctaggacaatgtatcacatttatttgccttgtctttctaatggagtacatgtttatttttcttgcctttaatgtgtgtaatttaatactcttttaaaacctattccaaattataatcactttaatggcatttaaaaaatattagaaatataaaattaggccgggtgccgtggctctcacctgtaatctcaacactttgagaggctgaagtgggcggattgcttaagcccaggagttcaagactagcctggacaatatggggcaaccccatctctacaaaaagaaaaaagaaaaatttgccagacatggtggcctgtgcctgtagtctcaactactcaggaggctgaggtgggaggatcacctgagacctggagttcaaggctgcagtgagccatgatcacgccactgcactccagtctgggcaacaaagtgagacaagaaagaaaagagagagagagagaaaagagaaagaaagagagagaaagaaagaagaaagaaagggagagagaagagagagagagagaaagaaaaagaaaagaaagaaggaaagaaagaaagaaaaagaaaagaaagaaggaaagaaagaaaaagaaaagaaggagggaaggaaggaaggagggaagaaaggaaggaaggtaggttacataaaattttttattgaaatgcaggtcagacactgacactgggaatgaaaatttgctgagtaggaaaactccataagggaaaacagatcaaagannnnnnnnnnnnnnnnnnnnnnnnnnnnnnnnctttcctatgttttggggccacacgtttttctccctctcattgttcttatgctactgatgaggcctctgtgcttctcaaactatttttggtaaaggatgagttgtgtttttttgtttgtttgttttgttttgttttgtttttgagacagattctcgctctgtcgcccaggctggagtgcagtggcgcaatctcacctcactgcaagctccgcctcccgggttccacgccattctcctgcctcagcctcccgagtagttgggactacaggcgcccgccaccacgcccggctaattttttgtatttttagtagagacggggtttcaccatgttagccaggatggtctccatctcctgacctcatgatccccccgcctcagtctcccaaagtgctgggattacaagtgtgagccaccgcggccggactttttttttttttttttaattattagtgctctttcctgcctatcaaggattgatcctttcataaaaattcaataaaaataaattattagaaaaataggccgggtgtggtggctcacacctgttatcctagcactttgggaggctgaggggggtggattgcctgagctcaggagctcaagaccagcctgggcaacatggtgaaaccccatctctactaaaatacgaaaaaatcagcctggcatggtggtgtgagcctgtagtcccagctactcaggaggccgaggtttaattgcgagaacccaggaggtggaggttgcagtgagccaagatcatgccactgcgctccagtctgggcgacaaagtgaaactctgtctcaaaaacaaacaaacaaaaactactagaggccaggcgtggtggctcacgcctgtaatcccagcactttgggaggccgaggcaggtggatcacctgaggtcaaggagtttgagaccagcctgaccaacatggagaaaccccatctctactgaaaatnnnnnnnnnnnnnnnnnnnnnnnnnnnnnnnnnnnnnnnnnnnnnnnnnnnnnnnnnnnnnnnnnnnnnnnnnnnnnnnnaatcgcttgaatccaggaggcagaggttgcagtgagccaagatcgtgccattgcactccagcctgggcaataaaagcgaaactctgtctaaaaaaataaaaataaaacattactagaacaatgaaataaaaatagatgcgtaatgattttgttcattattagattcaacagatagacttactttctcaaattgctgcaagtttctaagtgcctaggctgaatttctgtacttattgcacagcactggtctaaggatcagactctgagaagtattagtctatattagagcatgtaccatgtttagagatgagtgcctgcagggtgacagccttctcatggtcccttcatattctccagtatgcagggggctttgcatccagcacactctgtctgtgcatttaaatgggaaccaaacagtacactatgagcagaagcatagccttgtgaaaataactcaggccctaacgtcaggcaatgtaactttagagactctactgctccccagctctgtggctactggcaagtcatttaactcctctgggtctcagctttctcatctgtgaaatgtggataagagcatgcagctcggattgggaggaatagtgacacatactggtaaagcattcagcacaacaatggctattactactattgccatttcaactacaaacatagtcaaatactaaaaatctcagaaacaatctacaatctatattcctttggcaagcttatactgtaaagggctagaacataaatatattcagttttgtaggtcctaagatctgtgttgcaactactccattctaccgttgtagcgtgaaagcaaccatatgcaatatgcagaggattataggtggctgtgttctaagaaaactatttatgtgtaatcttggcactttggcagccaaagtgggcagattacttgaggccaggagttcaagaccaaccctggcaacaaggcaagatcttgtctttagaaaaaaaaaaattattcaggcatggtggcactcgcctgtagtcccagctacttagctactcaggaggccgacatgggacgactgcttcagctcaggagttcaaggctgctgtgagctatgattgcaccactgcactccagcctgggtgacagagcaagactgtgtctaaaaaaacaaaacaaaacaaaaaaaacaaaaaccaaccccacaaaactttatttatggacactgacacaggaaacttacaacattttcaaatgtcataaaatattattcttttgattttttttcattcatttaaaaatgtaaaaaccatttttaggtggcaggccatagaaaaactggcagcaaattgtgccgattcttagtaaaaagaattttaaaaagaaaaagaaaaacaggcagcaggccagatttgatcctctgcccttagtttgccaactcctgctctaaaccctttctacctcagttcagttaaaaatacctattgcatatgataaccctgagtgtacagagtaggaaagaaggtagaagaagttgaatctgccatgtgttaaggatttttgttttgttttgtttttaaacttcgttctgcaataatttcaggcttagaaacaaaaagttgaaaaaaagagtaaaaataattccttcattgattttccaaatgttaacattttaccacatttgcttttctttctcacgttcttttcatgcctggaataccatttctctccctctctctctctctctttctctctctctccatttttttttgtgaactgtttgagaatcagttgcaaagatgatgcccttttgtttcctaaaaaacaaggatgttcttttatataaccattaccaaaattaccattaccgttacccaaatcaatacactaatacaaaactattatttaatatttagaccgtgtaccattatcaaaatcagaaagttaacattgatgcggccgggcacagtggctcatgcctgtaatcccagcactttgggaggccgaggtgggcaaatcacttgaggtcaagagctccagaccagcctggctaacatggtgataccccatctctactaaaaatacaaaaattagccaagcctagtggtgggtgcctgtaatcccagctactttggaggctgaggtgggagaatcacttgaacctgggaggcggaggttgcagtgagccgagattgtgccactgcactccagcctgggtgacagagtgagactctgtccccccacccccccaaaaaggaaattaacattgatgcatggtactaatctaacctacaagtctaattctgatttcatcaactgtcccactaacatcctgtatataccaagcttcttatcgtcatcatctctggtaatttccccaattatccagtgaatttgatattattagccctgctttaccaacaaagaaactaagctcagagaggttaagtaatttgcccacagttacacagacagtaagtggcagagctggaattccaactcaagtgtacttcctccagagcccttgttctttaatactgaactagaattgcagagcttggaaaggacttcacagtgcaaggacacggaattggtactacaggcatgaaaagaagccaggcacggtggctcatgtctgtaattccagcattttgggagttccaggcaggtagattgcttgatcccagaacttcaagacctgcctgggaaacgtggtgagaccctgtctctacaaaaaatacaaaaattagccgggtgtggtggcgcacgcctgtagtcccagccacttggtaggctgagacgggagaattgcttgagcccaggaggccaaagctgcagtaagnnnnnnnnnnnnnnnnnnnnnnnnnnnnnnnnnnnnnnnnnnnnnnnnnnnnnnnncactccagcctgggtgacagagtgaggaccctgtctcaaaaaacacaaaaacaaaacaaaaaaacaaccccccaaaccaaaaaacaaaaacctaagaaaagccagtaactgatactttctcaatctctcaatgaaatgtcctttctgatactttctcaatctctcaaggacatgtccggtaggaaaggagaaaggagtgaacaaatagaattttggctactttgttatacaatgtaaaaaggctttttggaacaccaaggcataaactaaggttatttaaaaaaagaaaatttttttttgatacggaatttcgctcttattgcccaggctggagcgcaatggctcgatctcggtttactgcaacctccacctcccgggttcaagcgattctcctgtctcagcctcctcagtagctgggattacaggcgcctgccaccacgcccggctaatttttgtatttttagtagagacggggtttcatcatactggtcaggctggtctggaactcctgacctcaggcgatccgcccgcctcggcctcccaaagtgctgggattacaggcgtgagcaggattttcattctaacaagttccaggtgagttgatacagtggctccagggaccgaccacattttgctaacccccggcttagagttattcaaagagcccgtatatgagacgcggattccatctagggcgtttaggtttaatgattaacaatttccctcttctgctctctcaaggcagccagggaacagggagaccatgattcatgtccaatccccgaggcgcgttatcaagctgctgaaagcaggccctccggactgcagttccaaagggtcccttcccagggaagacgcctgcaaaacccagatagtactatcctggagtcacgcggcggcgcgcagcctcctagccgcccccacccgcccggctcggccacagcggggcggggcgcggggctgagcaggcgcgagggctggctgctgggccgacgaggggcggtgccaggccgtgggtccttagtcaagtgacgcgaagcggccggcctgggcgccgactgcagagccgggaggctggtggtcatgccggggttcctggttcgcatcctccctctgctgctggttctgctgcttctgggccctacgcgcggcttgcgcgtaagtctgcgggacccgggtacggggaggcattgctaggggacaggctggcggggaaccgggctggggtcgcagccacccgcggtcccgcagggcggggagcctgagccccgaagtgccccccagcaggctcgcggccggcggaacgcaggcagtggaccggccttccccgtcgggggcgggccgggcggggcgcgcgtccttccaggcagctcggtcgcttgtgcgttccgctccggccgccctttgcgcttggatccacttccccatctgtaacgaggtgttgagacgaggtgcgtgtaaacatttcctaagttggctttccgggaggggattccaagttgcgcgggttagagggtgcctccggctctggtttggggcgccctcgctttcccagttggtgctctgcggagcgctccggaaggagaaaaatggggtcaggagaggcccttgcagtgggaacattgggttatttcccctctgggtgctctccctcttcgtgcatcttgttcctttctcaccactccccgtcgcctgccctttggcttgggtttttctttgtatttgtgggaccgttttccttcggcgtttgggggtccaggttgagggggggaataggcaggctgccgggggatgccatcgttgatcggggcagggctggcgaggcgaataggtgaggtgcggggcgtgcacagttggtgggagaggaaggacagcttcactcgctgcgtccgagctgaggcgactggctgaggggctccaaagcgctgcctggggaggtttgcatcacacctgcggaaaggagagtgggtagttgcaagctgctcctctgcacgttccgcggaccaactttggttcctccagggtgtaggtgggctgagcctgcagtatgctttaagtaagagctggtagcatttgacaccgttgacttgtaagttacaccctttaataacgctttcaataacgtgcctagggcagagaaaagtggtacatttatctacaaccaagattgaacatcttaagtatttggaaaacagctgctgaaaatgttttcattttgggaaaaagtcagcacagattatttgctgctccctcttcaccccgtctgtggttcccctaccccagtatgtagacagagttttcttgtccagaaggcccgtaggaccttaggagtcagagctagccagctgtgagaaccactggggaaggtggaactggggcacagttcaggagaacagtggcagggtaaggggctaggggaaaggcagatcttaaccagtatctgggagtgggggtagggagagagagaaggatttatgaaccaggaacaggtggacagggtcaatctgtctgatgtgagctcatcagtcttgtgcagcgtcattgggtcagggtggatgccctgtggctgccatacctgaggcccacacagggaggctggcatcaccccaggaattctcatttcaggtgcctaggtgtccctcttgggcttctgtgcccacagctaaagaaagataccagcagtctagctttccattatctccttgtttacatttctttagggttcacgccattctcctgcctcagcctcccgagtagctgggactacaggcgcccgccatcacacccgactaatttttttctttttttgtatttttagtagagacggggtttcaccatgttagccaggatggtctcgatctcctgacctcgtgacccagcggttctcaaattttaactaaattttagctgtcctagaaattaagagaatattcctttttttttttttttttttttttttgagacagagtctcgctcttttgcccaggctggagtgcagtggcacgatcttggctcactacaacttccacctcccaggttcaagtgattctcctgcctcagcctcccgagtagctgggattacatgcatccaccaccatgcctggctaatttttgaatttttagtagagacagggttttaccatgttggccaggctggtcttgaactcctgacctcaggtaatctgcctgcctcggcctcccaaagtgctggaattataggcgtcagccactgtgcccagccctagagaatattttaaactatttgttaagaaatactacatcattacacgttaataaacaatatatatatttgaaaaacaatagtatttctccccaaattttagggtgaagagttgcactgttttacatttctgcaaatctctttcaatgtctcttaatagaagacagtcaaattttcatgtttatttctgcattaaatctgttgccatatcacatgtcacatagcctctggaagactccaccctcaggacagagtgagaatggaaaaggcagtaatggcttggaattataataaaaatagttttgactaattggacccctgaagggctctctccagaccacactttgaataccgctgatttggaatgtttttataaaacaagtacatgcttactgtagagaaactttaaacgtatagaacatgtggtaagaaaatgaaaactgcccatcatgtcacaatgctgtgagtttctttttgaataataaagtatagctagcaactgactggtatttgagtagcttggattcaaggtgggttgggcagatgtaagtggcctttgagttttgaatgggtacaaggacactctaatatcccacaaagctgatgctggttcctggttgcaggcggagttgacctggaaacctctccttggccactgtcctttctaaggaactcatttccagagtccaccagcacagaactggtgggggagcctactaggagcagagaaaatggccatcttcaggcagctgtccctaggcgcgaaggccaccctggctgctgtcactgtcttcgtgtccatgatcgcctcccgctcgtatctggcagagagccttgagctcagggcctggcgttggctgcttcgcttgcagcttgccctgtttgtcaactcgctcttgctcattggctccctctacatttggcgcagcacagtgagcaacctctgccactccccagctgcagagtcaacctgttttcagctttggaaggtggtggttctggcatttctggccctggcccattccagtttctttaccatgttctttttagtggccgaagagccctatctcttttccttggcggcctactcctgcctgggtgcttacatcatcatgctcttcttcctcttcatcctcagcggcatggagcaggcctaccagctcttggcctggcgcagtggtagggtcgtgggcagccttgagaagacaaggaagctcgtgctcaggcctgccctggcagtgggagtgactgctgtgctcagcgtggccgggattctgaatgccgcgcagcccccggctgtgaaaactgtggaggtgcccatccatcagctgcctgcctcaatgaacaacctcaagatcgtgctcctctcagacattcacttgggccccacagtgggcaggaccaagatggaaatgtttgtgaggatggtgaatgtgctggaaccagacatcacggtgattgtgggtgacctctccgactcagaagcctcggtcctgcggacggctgtcgctcctctgggccagcttcattcacatctcggtgcctacttcgtcacaggcaatcatgagtactacacgtcagatgtcagcaactggtttgcacttctggaatccctgcatgtccagcctcttcataatgagaacgtgaagatttcccgccacacgggcccaacgtggtggtggtggcagtggcagtgggagtgaggatgaggactggatctgcttggctggggtggacgatattgaagcagacatcctgcactactctggccatggcatggatcttgacaaggccctggagggctgcagcccagaccacacaatcatcttgctagctcaccagcccctggctgccaagagagctctccaggctcggccagatattaacctgatcctttctgggcacacacatgctgggcagatcttccccttgaacgtagcagcctatctcctgaatcccttctttgctggtctctaccaggtggcccaggctacattcgtgtatgtcagcccaggcacagcctactacgggatacccatgaggctgggtagcagggccgagatcacagagctcatcctgcagcggtctccctgaactggccctgccctgtgcacctctgccctgcccttgtcctcgaccctccatcctgcttcagagtggtttgcctgcttttcccctccagccttgcccactcatccttgcctacacacccttggtcacaagcctgactcaaacagtgacttatggtgggcctgcctggcatgttcaggctggtttaactatttccttggccagttgctttttttgatgcacttgtgagatcactaaggtcacatatattagcactcccctctattttccagatgatgtggaatggggaccttctcctgcagagctcccagggatgaacctcccctcggggttgctagaaaggcatacctctagaaggtggggcggggaggagcaggagcatttttctcctggtgttttaaaattgtctttaggacttaagtggtttccagaatcattgatccagagcctttctggggaaggggtagtgttgccaggtaatttgggagaacaggcaagatggaagggccctctggctgctagagaagaatattttcttttcctctgattctatcaggatcacctctattgagggcatcagcaaaatctactggaatgcaaagctcctcctgttccaggccttgagggatgctatttaactgtctgtgctcctgggcctttgggggcaaggtcaggggagaagaacggtgggcgccatggtcggtgatggtgagaacatggctgcttaggaattcagagggctttgcctcccttgtctcattttatacaacccttcggggagctcactggggacaggctgcttttccctatttggagataaggaaaccaaggcaaagagagatagggcacaggcagtatgacaagatatgtaggagatttggggctagaaaccaggtcttgtacctcccagtaaaagcggtgcttttgcccttttgccagaagcaatagatcctttgatcctgagatggagataagcacccgtgttagaaaaggcctcactgagaagacagggctgggctggtttcctgctgggtgatttaggcttgtgatggaaagtcttcctccaatggggagtgaagacactcgctctgactggagaggctaaccctgctgctcactcatagggcagcgttgggtgggtgactttccctcactcagccttggtttccatcaaccctaaaatggggataattatcgtatctacctcaagattgttttgtcaggagggatccatcaagccttgtgcatgagttccacatggcacagcgtgcacagtaaacactcaatgttaatttttcaacgttccagtggagcttgctaaggaactctgttgggcacaggtgcccagaggattcatggagcagccagtcctggggaatgtgagtgggtagcgagctgcctgctgctggggcaggtgatgtgtcaaagcagcaactgctaggggtttgccttcctcccctcatgtgcattctggcaggcaaagggggtttcttcctttcctccttgtcctcctggtgtatagtggggttctgggggatctggagaccaccctttttgttcccaggcagccacggtattgacagtgggccataccatgcagtttaaaatgtatctttgagttgaaattttggtggtttccttattcttttttctctcttcactgtccttccaaactcacttttcttgtgtcccgaccgcattttgtgaatcatccttactccctttaagttctcgctttggatttcaccaggtgggctagatggtgccatttcacttccactgtttgatgcggctggtaatgtttgactcacctgttacgtgttatttcactggtttcttgattttacatctttctcatcagtgacctgggcttgatgaaattagctttcattaagtcctattttttttttaattttgcatccttacctcttttctttctcttgaatgccatcattgtgtggtcttatgtacccttcatccactctgaagtccttgcttgactgattgctttctattagcagaaagaaaacaggtccatcctatgtatctgagaaacaacatcaacaccctctcgtatgtggtttgtattccctgacgcggcggacatttttgcagcagaaatttctccatcactgtccagattctggccctggtgggcaggtctccatgacacctttagtccctctgttcaacattcttaaaccatggacctttttgtttgtttgtggccgggggaggtggtgagaaacgttacttgaagcttgatcattctttcaatttcatttgtttctttatttttaatctgttagatgcaaattgaaatgcaatgctttttgaaaatcagcaatagtgtctgtagtatatgatgctgtcacaaaatctcaataaattgatcctgctgccattccttccaaatacccatccatgcttttcttcccctcgtgttttgtttggtttgttttaaacttttcgtacatgtacctctctcccagctttaacaagcatgacgagaccactctgccatcctttctcagctacccctgccccacctgtactctttattttttggctggagtatattaaggtaaatcatagaaaacataatgttaccccaaaattacttcagtatgaatcctttttcaaaaagcatagctatagtgtcattatcatatccaatgaaattaacagtgattcttgaatatcatctaatagctagttaggagatttggggctagtagccagatttttgacctctttaaagaagtgttctttccactctctgagtattaagtagctgtatctgtcacaaatgagtacagaattcaaatgcagttaactgtgtgaagagttagtgtttagtttttcctgattatctcaactatattttttattgtggcaaaaaaattactatcttaaccattttttttgttctttttgttgttgttgatcttaaccatttttaagtgaatagttcaacagtgttaggtatattcacattgttgtgaaattgatctaattgatctgtagaactttttcatcttgcaaatctatatacccattgagcaacaaggctccatttcccccttcctccagcccctggtgaccacaattctactttctgtttctatgaatttgactgctttagatacctcgtataagtgaaatcatgcagtttttgtctttttgtggcgggcttatttcagttagtataatgaccttaaggttgtggcacgtgactggatttctgtcctttttaaggctggactacagtaatactcttgtattttcatgccacattttgtttatccatgttgagcatgttttcatgggcttgttggccacctgtataccttctttggagaaatgtctattcaagtcctttgcctatctttaaatcaggttatttaatttattgttgtggagatgtaggagttctttatatattctggacattaaccccttatcagatacgtaatttgcagatattttcttcagttctgtacattgccttttcactgattgtgacctttgatgcacagagttttaaagtttaatgcaggcccatttctctatttttgcttttattttggcatcatatccaagaaatcattgccaagttcaatatcatgtagcttttttccccatgttttcttctaggagtgttatagttttgggtcttacgtttaggtctttaacccatattgaattaatttttgtgtatggtataagataagggtccaacttcattctcttgcctgtgaatatccagttttcccagcactgttttctgaagaaattgtccttttctaacatcaagagatcttggcatctttgttgaaaatcatttgaccatatacacaagagtttgtttcttggtgttctatcctctcattgctctatgtctgtctttatgtcattaccatgctattctgattaccacagctttgcaatatgttttgaaatcaggaggtatgagtctttcaactttgctcttctttttcaagactttagtctatttggtgtctgttgagattccatatgaattttaggataaatttttctatttctgcaagaaatgctattgggatttttatagggattgtgttgaatctgtgaatcactttgggtagtatgaacatcttaacaatatgaaccttccactccatgaacataggatgttttttccatttgtttgtgtcttctttaatttctttttaacagtgttttgtagttttcagtgtagtctttcaccttagttaggcctatttctaagtattttattctttttgatgcttttatatatggaattttttgaaattccatttaggattgttcatttttagggtatagagaagcaactgattttggtatgttgctttttgtatcctgcaactttgctgaattcatttattagttctaacagtttgtgtgtgtgtgtgtgtgtgtgtgtgtgtgtgtgtgtgtagtctttagggtttcctacatctgagattatatcatctgtgaatcgatcattttacttctcctttctaatttgaatgccttttatttctttcttgcctagttgctctgactaggacttccaaaactatgttgagtagaagtggcaaaaacagacatcttgcctttttcctgatcttagaggaaaagcttgcagtctttcactattgaatatgatgttagctatgggctcttcacatgtgggctttatgatgtggaggtagttttcttctattttgcatttgttgagttgttggtttttttaatcatgaaagggtgttgaatgcttgtcatgctttctctgcctcaatttagattatcatgtggtttttgcccttcaatctgttaatttggtgtattatattgattgatttttatatgttaaaccattcttgcatcttaggaataaatcccacttgatcatagtatataacccttttaatgtactgttgaattcagtttgctagtattttgttgaggatttttgcatcaatattcaccaggaatattattgttctgtagttttcttgtagtgtatttgtctggctttggtattaggataatattggtctcatagaataaatttagaaatgttcctcctcttcaacttttgtaatagtttcaggaggattggtattaattcttctttaaatgtttggtagaattctccagtgaagccatctggttctaggtttttctttgagtgtgtgtgtgtgtgtgtgtgtgtgtgtgtgtgtgtgtgtgtgcgcgcgcatgctgacacatggtcttgctctgtccccggggctggagtgcagaggcatgatcttgggtcactgcaacctccacctcccaggttcaagcgattctccttcctcagcctcccaagtagccaggaccacaggcacgcgccaccacacccggctaatttttgtatttttagtagagacggggtttcaccatgttggccaggctggtctcaaactcttgacctcaagtgatctggccgcttccccctcccaaagtgctgggattacaggcgggagccaccgtacccggcctctttgaggtttttgatgactgattcaatctttttaatagctattggtctgtatagattttctgtttcttcatgattcggtcttggtgggctgggtgtgtctagaaatttatccatatcttctaggttatccaatttgttggcatacagttgttcatgctattctcttacaattctttatttctgtgtcatcagttataatgtcccctcttcatttctgatttatttatatcttcttttttttaaatctagttaagtttctcaattttgttgatttttttttcaaaaaccaactgtttttttttcctactatctttctattctcttttgtttatttctactctaatattttatttccttttgctagctttgggtttatttttttcttcttatggaattgtctttttatagttattttgtttgaaacaggatctaaaaataggtctatattttgcctgtggtgtatttcttcagtctccttaagtctataacatccccttttccttattttttatcatttatttgttcaagttatctgggtcatatgtcttaaaattttatacattttagattttggtgtcatttaacatgttcatattttctgtgagctcatagagctaaagctctctaaaggttagagctagaggctggttggattcaggttcaactttttcgctttttgggtaggaagaattcattgcttcactgatattaagattgacctgttggtccaggtgttgtcagcttgatccctccgctagaaaattccgcattatctttccatttaatgtttcagcagtcattggtgattgttgcctaatgtcattatttcactaaagattgcagaatagtgatttgtaaaattctaccctttttttcctgcatttactggctatggatcctttacaaagaaatctcctcattaattatgtggttactctgaaaaagcctataacaaaggcaagacagataccagattctttcacttgattccttagtttatagcataatgatctgataccacagcaacctccaagaatgaccaataagcttttcttctgggtgggtgaaatattgttaggaatttagatatttagatattttatatatctgatgttttttagttcatcaaagtgttacatcttttaatactcaaaatagcccatctttggccagttgggaccttttcatttttcattttttactttttagagtcttagtcttgctctgttgttcaggctggagtgcagtggtgtgactgtaactcactgcactctcaatttcctgggcttaagcgatacactcactttggcctccagatagctaggactacaggcatgcaccaccaccaccactcctggctctttttttttttttttggtagagacagagtctctctttgttgcccaggctggtctcaaactcctggcctcaagcagtcctcagcctcccaaaatgctgggattacaggtgtgaacctgtaatcagcctcccaaaatgctggcattacaggtgtgaaccactgcacttgagctggttggagccctgtcatcttgtcattttgatgagaccctaatagttttgtttttttttttaatctagccctgttttgtacatcttatgccacagacttggattaactaatttcttgaagaagcagctttggttacttttagtgggaaatgtttgcagatcacaatttaggcgctatatgggttagattgctacccgctgatatcatttccaaactgtgtctttgggtattgctaggaaatgcaatacttttttagagagaaaaaaaatcataagtgtatactagtatttacaattcaaataagagattatggattttattgttttttaatggactatattttttagaatagttgtagccttatagcaaaattgagtggaaggtacagagattttcctgtatctcctgattatggggttcttaattttgtttgattttatgtttgtttctctctctctcgctttttttttttttttttttgaaacagactcttgctctgtcactctgattggactgcagtggcaccatcactactcactgcagcctgaaccattctgggctcaagcaatcctcccacctcagcctcccaagtagttgggaccacaggcatgtgccaccatacccagctaacttttgtttattttttatagggatgggatctcattttgttgtccaggctggaacttctggggtcaagccatccacccgcctcagcctcccaaagtgctgggattacaggcatgagccactgcacccagcctgtttctcttttacactgaaaaatttggttcttagtaacctaatgtagttacttacttcttttatcctactacatatataatagaaccaaaatagtaacgtcaatgtggttattaagatgaagtctactgaatgcagtttgcttttgtttttttccctgaatgcagtttaagctgtatttttatccttaggccaaatatggtcaatgtagtgtggaaagttagatctgtatgtttttaattttaaagaaattacatattttttaatttaatttttatttttttaaactgcacatttaccttttctctgagatgagggggcacatttaaatctgtgtatgtccagagtccgtgaggattgggaatcagtctaaagctgtgctcgcttctcctcttccattgcgatttgccttctttatccagtcttttggaatgctgaacaaaaatgtttttggcacaaggcaggcgtgaaaacataaagttaataaaaatcgaatgcataagctagagcagattatccacagattcttccatctccatatagattatcaccattgcctgcacctgttttccttctccagcctatctgatggaatggtgcttccatgacatgtggtatttggaaggctcttagctctgatgtaatcagggtttgacccatagtcacctgaaatagttcttctgtttctctttgttctatgaactgaagggtctcagaagcccgtgttatgcaaatacccttccatccccttccctctccccttgcctctatccatgttccctcagcctcagggtgcttgcaggctaagaggattgggtctctggcatcctggagctgaacagctcgtgtcaggaattccccaggcccttgagtctctggggtgagttgtaggggtgtgtagggtgctggggattaagatctgctgagtaggtgcttaccagagttatactgaaggacctgaagacagatcatcttcacataatcagcatgacccataatctgtgatgtcactgagcttcttttatttctgtagtcaaggaatgtgcacaagtaatgcaaatataattacttttagtcctgaggattagggaacttgggggatgttcacattacctgatgatgtcaatattgtgttatgtttaattttttttaaaaaagatgcttatttattactgaaataatctaaactgaataaataactttttaaaaaattacattggccagtattaggttcctgatacgtatttggtgttttgtttgtactgctgggttttttctctccagtattggatgcgttaacggggagccttgagaagttatgaattttggtttgttcggaattgctttttataagttttctgtgacctcatgcactaaatactgatgctaccacactcctgcaagtatgaaataaaagtatgtctcttcagtattgcattcctgcgccaattcatttagaagggtagaatttgcacacaggtcaaatcttgcattatttgcatttggggggaatacactctgaaggcagttttctctctctctgtctcctttttcctcctttcttcctcctattcccacttttttttttttttttttttgagacagagtttcagtcttgttgcccaggctggagtgcagtggcgcgatcttggctcactgcaacctctgcctcccaggttcaagggattcttctgcctcagcctccaagtagctgggattacaggcatgtgccaccacacccagctaatttttgtatttttagtatagatgaggttttgccatgttggtcaggctggtctcgaactcctgacctcaggtgatccacctgcctcggcctcccaaagtgctgggattacaggcgtgagccactgtacctggcctattcccactttttttgatcgccttctgtcagtagttccacagctcagaggaagctcaaaggaagctgggtcttttttttaggtccgtaacttttgagaggggtcatcttgggtccatgaagtggactgtccctgtttactttggctgtgacagtcaacaatgatgaactgtcttttaagtgatactgcttctgcagctgtccatcttgatcccctctctgtggcttttctaggtttttgtttcagagacatgtcccctgctctcctggttcaaataacatggtgatgttcatctctcagaccatgacagtccatgaatgcacagacagtccaggtctcgtgtgatacagcagggcagtggacacagccccgggcaagagggagaatatactgctgtcctgcccactcacgaactgttttcaatcctttttatcagtaggatttgaaaagattagaacattaatcgcaaaccaaatatcagaggctgtgttgttctgtcccagtggtaatcccatacctacatggtagctgcttttggagctactactcggttaattaagtggccaccatcatgtactgtgatctgttttttctggcagaggctcacgggcaatttgaatgaacatgatggaaatgatctttaagtctttgtggagggggcactaatagctacaattcccagaggattgtggtcttgcttcagatttatcttgagtgggagtggggagtgggcagttccagagcttccacttgatccatgatggctcctactcattatgagggttctgcaggccattatgtaaaaccatcccactttgaactcatagccagggaaataaccgtgtgatggatcctctgatttgttggactctctgtgaaaaggactggggccaaggctcccattatccctggcctccctaagagtgataagggagagtgatggcatttcaggttccctggtgctaccatgtcagttcagactgtatccagtagtcctcagaaggtggtggccttggggtgccccttttcttaggacacagttaccctgagtcttgttgggaaggattggaggaatatttactgtgtggacttggggtggtaatgcaggatccttcctcaaggggatccatccaaccttccatcaaattttgttgactgtatgttagagaactggctcaaagctgggaattggatgaaggaatctcaattttccatgcagttgttgacatcagccttttgctcacaagtttttaaacatgtcaagcagtactcttgctgattgcctggccaactcaccccacagaaacgtgtggcttatgagccactgcataaggtcactcctggtccacaggtcagcacaccctggttgccactgtgaccttgctggttgttgtggtaattgtgccttcctgcttctgatggttaagcggtcccatgctggttatgccagaacctcatcatccccagcgacactagggcgccccttgcctgcagaggatggccccactgggggggcttcccaagtatgccagggccctcctcaccagtgccttccttcctgaagggagagttctctgggctctcctggggaatagagccaggtagtggggtctctggtcaccctttttacattcccacctcttgagccattccatacctttctcaggatgccaaggcagtcctggcatcctcacctcatttcctgtagaccagcgtcatgtctaggttccaaggatcctcccaacagcatagggactgggctcttaccaatagaatataggtcatgggagaatacaccctaccagtaacttccccatatccggcctgggattttccccctcaagatccattcccagtgacccccatagttaggtcttacttttctggcctgagatgtgagtctctttaaacattgccacagaagcctctgatattcataggatgccctgagtggatggctcacctgagcccatcaaaccgtcactgtcttcaaagcttccaaatctgttaataaaagccagctaacctcacactcctttcaatgaccagtgacccccacctctgccccgctccaggggtggagccagtgcagataccgactgctccccctctctccatgcctcctcccggtcccacagagttgagggccttggtatttgtctttgaggcgttaccaccccacttagcaccagctataaggttcttgctatttgacattcatgagacaacaaggtgcagactcacatcctgatgatctgctgttgaggccactcctggtatcaaggtcgtactttgggtccctctagaagcagaacattgggtgcaagtggtttgagaagtgatccaagagcataggagcaagggacaggtggaaagaagggacagcctgggtcagaatgcatattgtagttatcactctgggaaccgggacatgattcttctgagacctcctgaaaagtgcacaaagtgtctccagaattatttgcctaaaaaacaagagaatgcagttctccaccctctttgtccctcattggctgaaggttgccctcaggggcatggactgcctggtgctcctggacttctgggctgaacccattcccccagtgttggggcagaaaggcaaaaagacatgagatctgagtgtgagttgagacaatcagcacaaagcatactgagcttgcacaagaccattcacagagctacagctgatgtaggcatgtttttaaaaacttttaaagaccaggcgcggtggctcacgtctgtaatcccagcactttgggaagccgaggcggcggattacctgaggtcaggagctccaaaccagcctggccaacgtggtgaaaccccgtctctactaaaaatacaaaaattagccgggtgtgggggcaggaggctgaggcaggagaattgcttgaactggggaggcggaggttgcagtgagctgagactgtgccattgcactccagcctgggccacaagagtgaaactccatctcaaaaaacaaacaaacaaacaaaaaaaaacagttttcaggctgggcacagtggctcacgccagtaatcccagaactttgcgatcgtgaggtgggaggattgcttgaggccagcagttggagaccagcctgggcaacatagtgagatcctatctctacagaaaatttgaaaattattaactgagcatggtggcgcacccctgtggtcccatctacttgggaacagaggtgggaggatcgcttgagcccaggaggtcaaggctgcagtgagccatgatcatgctgctgcactccagccagagcaactgagcaagaaagaccctgactcaaaaacaaaaaactctctcctctgccttctcttttcaccctatatccctcccaaagtgctgggatatccatcggagatcatttcacaatggcaagggctacatactctccagagctgcgtaacatttgatcatgtatgtgtatttgtatatatacaaacatgcatgtacaatacacatacaatataaaccataattcattttatcagtctgcatttttatttgtgtcaacattttgctaggaaaatttttcagagagggttgaaagattataccattaacatattactatcagtccattcctccatctatcaattcatcttattttttgaatgtatttcaaaataagttgcagatatcaatgccctcctcttgctaaaataaatacttcagtaggcatatcattaactagcagtcagtgtttgttagtagcccctttttcttccaaggtaaaatttacatacaatgaaatgcacatatcttaaacgtaccatttgatgagttttaacaaatgcctacacctgcataatccaaaacccttatctagctatggaatattaattaccattaccccagaaagttccctcacgtcccttcccaggcaatacctacctctactctcccagagttaactattctgattttttcttccaccatagattagatttgcctttcccaggacttcatataaataggttcatgcagtatgaacccaattgtgtaaggcttctttctctcaacatttttgagatttatttacattattacaaataccagtagtttgttcttttttattgctgagtagtagtctatcatatacatatgccatagtttgctgaagcaggagaatcgcttgaacccaggagttcaagactgccatgagatatgattgagccattgcactccagcctgggtgacggagcaagaccctgtatccaaaaaatcttaaaaaattataatagtaaataaaaagtaataaaaataaaagaattaggatccaaaccaggttcacactgacctaatgaatatcgtatcatttcatattacgaatattgtaccataccttattacacatatcatatcacatataatgatctaatgcaatcattaggccattattcctctgaagttctttcatttccaaataatactccctttctttcttttaataccattgatttgttggaacaactgaatcattggacttttaaaatgtcccacattttggatttggcttattgcttccttatggtattattagattcgggttcaattgtgattttgattcaataatgaggactactttctagatgagactgtacttcgtgttaaatcataacatgagagacataatgtctggctattcgacttttattgaggctgaaattgagcagatggagcacaaaaaatatgcccaatccttcacacaatttccatcagtgtttctaatggttttagcatctattgatgattatagcttaaatccatttcactaagtgttggggaaaaggtgttttcagatgcttttattccttctgcatttattgttattttgagacagggtccctctctgtcacccaggctggactgcagtggccctatcacatctcaccatcgccttgacctcctgggctcgagcaatcttcctgcctcagcctcctgagtagctaagactaccagtgcctgccaccataccggctaattttgtttgtttatttattttaaacaagaagtttaaacaacaagcttcttgacttgaaggaaaaactatctaggattcctttttttttttagactaatttatccctacttaaagacaaattgccctacatttaacaactatgtacaacaaagttataaaattgtccttggttttacaatgataaatgaaaaacattaacattctacaattgaataaagtatgcaaggatttttatgttttttttttgttaaaacagcaaaataacttactgaaatataaagataagagctgaatgagcatgccactaatgaagaaaagggagtatttttacagaatcggtatttttccccatctcatctccacttgatatcaatcaaaacgtaccattggctgtttagttaaaaaaaaaaaaagtaatatacttgtgcacatttaccagttactttatgtacaataaaggaatggggaagggggaaatgaaagaatagagaaaactatactgtagtagtcaggatgtggtggaaccaaattgcagttttctaattgagaatgtgatcttggtctgtaaagaacagagttctggagtgaagtgggaggttccctttttagtagacaccccctgactgctgttggaacatatcggttgtatcttcatcctccatttccaactgagcaggtgtgtctctttcattgattggttgcctgtcaaattggaatctgatctgtctcattgaccatccctatcgttcacaacaggctttcattagtttactaagtggtgtatgcctcttaatcctaaactgcaccacagaaccctcctgccctgccaccttcaaattaatatgatctttgttctcagtctcgattccttccttgggcttttcatctgccacggcaagcgcctaagtctcagctgccgcttcacaaaagaggtaccaagactgcaccgaatgagcacgcaagcagcaacaggagtgggagaagaaggaggcggcagcagtgggtgagggagacactaattttaatttttttttttatagagacagggtctcgccatgttccccagactggtcttgaactcctgggctctagcaattctcctgccttggcctcccaaattgctgggattacaggcatgagccattgtgtccgggcccttctgtatttaattaactgggatccagtggagaattttccattgtcaatgttttgataaccctgaaatacagtttttatgtgaaggggaagtaaactgcttgactctttctctgtatttatcacttttcatagtaatgagttggtactctagcagtctccaaaagtgaccaatgaattttttctccctgtaaattacgatgaactgataggtgttaatatacacgtagtcatattttttaaattgatatatctcttaagtctctcacatgctcgctctctctgtctctcattttgacactcagatttctccccaagaacagtgggagcctcttcaggttcgcgcctgtgcctcacatctaactggccaccatcctggaatgtcctccttctgcctcctgcccacctcattgtcaccaccgtgggccatagccacatctcttctgccttttttgcccattcaggaaaaagccaaacatttgaaaacacatatctggtcctatcattctttcatttcagttgctctccatggctctcagcataaaatccgggcccttgaatctggacttcagggctcattcgatctggccctggcctcctcctctgcctcagcagctgccatgtttcaactatattgaggctctgtggctcctggcctgtagtcctgccctccctcccccaggcctcacacgcagttttctccatctgtgtcaccttcccccatggctaacttcgctttatcctaggccttggctcaggccagtggttctcaaccttggctgcacattacatcatctaggcagctttaagaaattccaatgtctgggttcctcccaagaccaattaaaacatgaatgtctgggggtgaggtcaactttgctttttttttttttttttgagacagagtctcgcactgtcgcccaggctggagtgcagtggcacaatctcggctcactgcaagctccgcctcccaggttcacgccattctcctgcctcagcctcctgtgtagctgggactacaggcacctaccaccacgcccggctaattttttttttgtatttttagtagagatgggatttcactgtgttagctaggatggtctcgatctcccgacctcgtgatccacctgccttggcctcccaaagaactttgctatttttaaaagcttgcgtagatgattttgctgtgcagccaagattgagaaacacagtttggggtgtttcttcctttgagaaacttgcccttgcccctcccctcaaccctgccatgcctgggttccctgccatttatttctgctgcagcattctgctctaacccttactttaccgcctcgacctcactgtgttaacccttgggtttcttctaggctagatggaagctccatatgggttgtggccacatctgtgtggttcttgtctgtgattactcagcacgtaagaggtgcttggtaatactatatttgtaaatggatggtagggagatatttagactagactgaggtcattggagggtagagacagtgtcccaccatgtatgggacaaaggccagattccattgtctcccaccatcattttttcccagccttatctcctgctcctctgaactttttcacttagacaggtggatttcaaacagctctacccttttccgaattctgccagtagttgcttggcctcctttctacctgtctaatgaatgttcccacctcatgggccacctttgaacttaggaaacttgtgaggaacacttatttgacacttagccatgtatatactatgagaatgttttcaagagcatccattgagacacctggtgtaagaaataatttttctatttttgtgagtttaggggacttttcctttgaacagaaattaaaaccttatttactagaagaataaagtgatgttaaattgacacttgcccttttaaaaatgattcttagttgtttgtgtttatttagctttattgagatgtaattcacttacagtgaagctctccatttgcccctatgaattcttctctgagttgtttaacttccgctcgccagttggatttcaggcatgtgtgatctaggactcatgctgccacagttgcttccaaatacagcttcaagggcaacccccaaagccaccatggactatgatgctactgtgactagagctagtattgtgacctttgaaagcctaaagatgcacaaggaatctgacccataatggaaagcactagttagttggcttcttaaaaccctggttctcttggctcctgtggcctgttgctgccttatccaccagagggcagtgttccactcggcttaacagtcgaacccccacccccaccacccgttgaggtcttgcctttcaaaatcctaacattttagctcctgaagtgaccccaaaacagtgtttcttaaaatcgtgcttggtagaaataaatcttacattgcaaccaaatatacatgcgtacatatacaactccacatatgtatatataacaaaagttttataaagtaatactttactatgtgtaatatttctttctttctttctttctttctttctttctttctttctttctttctttctttctttctttctttctttcttccttccttccttccttccttccttccttccttccttccttccttccttccttccttctttctcgttctttcttttgacggagtctcgctctgtcacctggctggagtacagtggcatgatctcggctcaccgcaacctccacctctccggttccagggatgctcctgccccaatctcccgagtagctattttttttttaatttttggtagagacggggtttcaccatgttggccaggatgctttcgatctcctgacctcgtgatccacctgcctcagcctcccaaagtgcagggattacaggcgtgagccaccgcacccagcctctattttctttcttgccttttttttttttttttgagacaatgtcttgctctgtcacccaggctgcagtgcagtggcatgaacacggttcactgcactctcaaccttctgggctcaagcagtcctcccacctcagcctcccaagtagctgggagcataggcgtgtgccaccaagcctgcttaatttttgtttgtttgtttgtttgtttttttgtagagacgaggcctcgctgaattgcctaggctggtcttgaactccttagctcaagtgatcctccaaccttggcctctcaaagtgctagcattataggcataagcaacggtgcctgctattctttgatttttatttttatttattttattatttttttgagacagagtctcgctctgtcgcccaggctggagtgcagtggtgtgatctcagctcactgcaacctccgcttcccgggttcaagcgattctcgtgtctcagcctcccaagtagctgggattatagacgtgcaccaccatgcccggctaatttttgtatttttggtagagatggggtttcaccatgttggccaggctggtcttgaactcctgacctcaggtgatccacctgccttggcctcccaaagttctgggattacaggtgtgagccatcatgcctggacaattctttcatttttaaaagatgcttattgccaccaaaaatgagtttattattcacaaatcaggtcatggcccacaattttacaaatattgccttaaatgccttaaagttcttttagtctaataccctggatagttatggatgaagagaggtagggttagagatgggacttatccaggtcactatgggattcagagcaatatctaggatggggcgtcaggctctggagttttaatccattgctttttgccctgtattttacacttagaattttgttaatgggtcttggttatcccagtgacattgttgttgaggtgcatccagtgctcaggcaggtcacagcaacaatggcgtgtgtgcgtgcatgcgtgtgtgtgtgtgatgttccccagccccatgaacagcacagtggaatatcatctcagccactgattgtcagctcagtgctggcctctagaagctaagccttatggaatcctgcatgtggatcctcttagatgatttctcttacctgagtacccctggtggacctggcttagcaatggtttgtatgatagctcagaaaacaagcattaagtccatcagcacattatacaaattcaataggcagagagtcacttgctactctcaaaggatcggcttctgaaatgcagaaggtggaagttctcatgtgaccccatccttgctctgtagaatgccacccagaggatgtttgaaattgactatagccgggactccttcctcaaggatggccagccatttcgctacatctcaggaagcattcactactcccgtgtgccccgcttctactggaaggaccggctgctgaagatgaagatggctgggctgaacgccatccagacgtaagtaggagggcatgtggctctcacctaggcctgaacacccactctggagagaagatacaactgtatttctcagggtggctattttattgctcagaaatgggaaatggtccagtgtgatgttctgggaggggcttgtcatgagccggactggccctttttcaaataattaactacttcttccaatcttcaattttaatcatcagaaatcattaaataaatagcttaaaaaggaaaaggatgggggaagcaaacagaagtaacaatgattgagcacttaccagatacagggcactttatactaatgattccatttcctcgagataggtattattgttcctgtttatagctggtgaaactgaaatttgcccaaggccatatctttggtcagaggttcagctagtatttgaagggaagggaaggcatgcaggcagctgtagcacaggtatggctgtagtcatacaaaaagctaggttaacaggagaaaagcataacagatatgtaagttttatctgacatgagagtcttcagaaaagaagacccaaggaaaactttttacacttagattccatgaaaggttctgacctaatggtggtggactgaagtgggaaaccctcaaggcctgcctcaacagattcttcttggcctttctgggtggcattccttccttctgggtatggagcaggacccctctgcaatgagggtctagaagggagaagggagaggtgacctttctaggttttctggcttgctttgggagagaggggttctaatttctatgacccacactgggggaagatgaattctggtttgacttgcttcaggggagaaggaggggtgggcaacagaagagcaggagaaggccagagaaagaagatttgcttctaaggccttccgatctcctttagttcaaagtacttagcatgccaaggtgccatactttggggtattgttttctgagccccaataacagaataagccttgtgcttaggtagatttctgaaacccagtttggctttgtggttctgctgcggtaattgtataacttcagggtgtagaattatcccaatagctatctctctgcatctcttttgctattgcaaagtaactaactaacaggcaagaaagttggtgtggctggctgctctggctcttgcagtgctgatgtggattgctgataacttctcaaagatgaagagtgagaaaacccagaggcagattccgaagatagatacttagggagaatgcgctcattattctggttctaaggccactggcagagtgaacccaagttcacctgtttataattccgacagtgagttctggaagaccaagactgttccagggaaccctgaaatcatgggatcacacacacgcaaaatgacacaacccagggtcttcaaagagagctttgtgatggtaatggatggctccatatttaactttgtatcccatgctgtctgtaggtagacagaggagctggtagaaggttttgtcattttacctcctgccacatgattcctgacaaaatcttttgtcagaggatctagggcttggagtttttcctacacgtactaaaaattatttcttcaaaaaataaatatgtctcttactacttttcagcaaaatattcttatttttcctaagcctcacatggacatatataatttttatttttatttattaaaacaattttttagagctggggtcttgctctgtcacctggctggaatgtagtggctcaatcatagttcactgaaaccttaaagtgggctcaggtgatcctcccacctcagcctcctgagtagttgggattacaggcactgctaccacaccagctaatttttttgttttgctttgtttttagagatgaggtctcactatgtttcccatggtggtcttcaactcctggactcaagcgatcctactgctttggcctcccagagtgcagggattacagaagagagctactgtgcccagctataatttttatgtaataggaattagtgctgatataactctggagttttctgttgttgttgttgattttaagaagtgtccccatgaagtctgactagcttggggagctgctgtaaaaattcataacaaggcccctcccaagaggctgccaagcgggaaggtctatgtgtcctgtggtttatggttctacaccatatctttctctatagacagtttagaaatttatgtaggatactggatttttgagctctttccccttccacagagcacctcaattcaattatttatgcaaaatataattacaaaaagctaaaaacctgacttacaaacaagtatataatggacatatgtcagaaatttatttaactggataaagaaaatgtggtacatatacaccatggaatactacaaaaatcacaaaaaagaatgagatcatgtcctttacagcaaactggatgcagctggaggctattatcctgagcaaacacagggacagaaaaccaaataccacatgttctcacttataagtggtagctaaacatcgagtacatatggacacaaagaagggaacaacagacaatggggcctacttgagggtggagggtgggaggagggtgagttcccctatcgtgtactaggcagattatctgggtgactaaataatctgtacaccaaacccccatgacacgcaatttacctgtataacaaacctgcacatgtacccctgaacctaaaataaaagtttttaaaaatttatttaacttattactgaggaaactagctagatggtaaagctaattcaaaggagaatttgaggaagggaggtttacggtcagtcaagaaagtcatgttcaaataaagttatctttagagataaaactggttagtatcataaagggcaatgaatgaaaaagcaacctttagagttgtcttctctgtatgacaatcatttgtttctctctcaggcaataatctacaaattaatctgtaacttcaaagttcttcccttaatcaatagtaaatagtaagtcaaacaaaatatctcccctggagaatgaaggaagcctcagtgggcccattggacagtcctccattataacatggaaaggaaatgcagtcacccttttgccttatatccaaattctggataatttttcttttcttttctttctttattttgacacagggtctcactctgtcatccagtttggagtgcagtggcacaatcacagctcactgcagcttcaacctccctagcttaagcaaacctccacctcaagcctccagggtaactgggaccacaggcatacaccctggctaatttttttgtgttttttgtagagacggggtttcaccatgttttccaggctggtgtcaaactcctgggctcaagccatccgcccaccgtgacttcccagagtgctgggattagaggcctgagccactgtgcccagccttggataatttttctttcaaagcgccttctccctcttatccatgtgttagcaatagtcctaatgaggccctttccccacgcttctttcttcttgactctgccaagtatccaggaaggggctgtgtgtgtcttggcaggtatgtgccctggaactttcatgagccctggccaggacagtaccagttttctgaggaccatgatgtggaatattttcttcggctggctcatgagctgggactgctggttatcctgaggcccgggccctacatctgtgcagagtgggaaatggtgagtgtggctagactgggctctacctggtgtgtgtgagctggcaggcagcagctctggggcaaagggaattaaagcagacctgcattccagagagcatggggcctgggactgtacccagcacaggtgtcttttaccttgacaaggtgcccaggcagagaaacaggccagggtcagggcatgggctctcctcttggtggtcactcacatacctcagcttgctcatctgtaagaagcagttaatggtgtcttctctatctacgtcacagggtatttgtgaaattaaattgaaaaatctttatgaaaagggctttggtccttaaaacattgcattcatgcagagtgatcttaattgtcctacattccaatttctaatttctctgcaagttataaaccaaaaagcccagctcaaataccccttgtcccttgaagcttttattcttttccataactactaatagtaatttctatctcctctgagcacccttcacggaacagacattataatggcttgttttccctgaactagggaggattacctgcttggctgctagagaaagagtctattcttctccgctcctccgacccaggtaggttgttacagatgtcttgagaagatttataaaagcttcagcctaggtgcggtggctcacgcctgtaatcctgacactttgggaggctgaggcgggtggattacctgaggttgggagttcgagaccaggctggccaaaatggcaaaacctcgcccctactaaaaatacaaaaaattagctgggcatggtggtgggcgcctgtaatcccagctactcaggaggctgaggcaggaggattgcttgaaccctggaggcggaagttgcagtgaaccgagatcgtatcaatgcactatagcctgggtgacaaagcgtgactctgtctcaaaacaaacaaacaaacaaaaaagcttcaacaatttatatcaaaagggggaggtattttgaaggctggggtacctctgcacaaatacttttgaaagtttagtgaaagtctgagtgtttatcactgaccagtgcatagcaacaaactaaacctctaggaaattaggctttgaactacgtaaccagatcttactgataaactggtaattctttgaattggtattgaaccctgtttgcggttgaccaactgacttcagtgctttctcttcctatttacttagcatattccacagccaatgatagcacctcgctaatcaaaatgacaagtcaggcatggtgactcacacttgtaatctcagcactttgggaggccaaagtggagggattgcttgagcccaggagtttgataccagcctaggtaacatagcgagaccctatctctataaaaaatttaaaaattagccaggtgtgctggcacatgcctgtagtccgggaggctgaggtgggaggattgcttgagcctgggaggttgagactgcagtgagccatgattgtaccactgcactccatcctgggcaacagagagggactttgtctcaaaaaaagaaataaggtcgggcgtagtggctcatgcctgtaatcccagcactttgggaggccgaggtgggtggatcacctgaggtcaggagttcgagaccagcctgaccaacatgaggaaaccctgtccctactaaaaaatacaaaattagctgggtgtggtggtgcatgcctgtaatcccagctactcgggaggctgaggcaggagaattgcttgaagctgggaggcagaggttgcagtgagcccagattgcgccattgcattcctgcctgggcaacaagagcgaaactctgtctcaaaaaaaaaaaaaaaaaagaaataaaaacaaaatgacagtttctgggatggtgtcattggattgcttggtagctgcaatgccttctatattctggccacttttatagagcaatgtgtaaatgatagtttttttctttgtcttactccagtaccttcatgttttgcacgcttagcatattattggtgttttcactgtggtaactcatttaatctttatgccaactttatgtggcatgtacatttattattcctatttgacaatataaatatataatttattagaacttcattttatacggaaaaaaagccttcctgtgactgagaagaggatacactgttcagtcactcttttcttcattcagcaaacattgcttggatatgttctatgctccaggctttgtgtcctatggcaaggatggtcttagtctgttttctgttgcttgtaacagaatacctgaaactgagtaatttataaagaaaagcatttatttcctacagttatggaggccaagaagttcaaggtggaggggctatatctggtgagggccttcttgctggtggggactctgcagagtcctgagggggcacagggcatcacatggtgagggggctgagtgtcctagctcagatctctctccctcttcttataaagccaccagtcccattcccatgatgacccatgaatccattaacctattaatctattaatccatgagtggattgatctacttatgagggctgagccctcatgactcaacacctcttaaaggccccacctctcaatactaccacattggggattcgatttcaacatgagtttcagagggacaaacattccaaccatagcagatggatacaggcacactgatcctcgtcccctgaggagctcagctgaggagacaactacatgcaggacaacttttatgagacttttacttcagaaggtacttgtcgagtcctgtatatcctgatctctgctgccagccctggtgtaataaggctgcactggtgtctctttgtactaaatcataattttttttttttttttttttgagacagagtttcactcttgttgcccaggctggagtgcaatggtgcgatcttggctcaccgcaacctccgcccccccgggttcaagcaattctcctgcctcagcctcccaagtagctgggattacaggcatgcgccaccaagcctggctaattttgcatttttagtagagatggggtttctccatgttggtcaggctggtctcgaactcccgacatctggtgatctgcctgcctcagcctcccaaagtgctgggattacaggcgtgagccaccgcacccagccagaaaactcagaatgtttttaaaaagtttacgaatttgtgttgggccacattcaaagccatcctgggctgcatgtggcttacaggctggggttggacaagcttgtgttaaacttttcttgttttccagattacctggcagctgtggacaagtggttgggagtccttctgcccaagatgaagcctctcctctatcagaatggagggccagttataacagtgcaggtaaccctggagttgagcatggatggattgggggaggggttcccatccatctacattacataaatgatagaagtgatgcagacatgagcctcataggtctgtttctttaagaggtaatgccacagatagtgcttttagttcaattgcatttgggaaggcattgccatttttgaatgcctgctatgtggcaggctttgtgctgggtgccttgtaaatgctattcaattcttccaaccaccttcttttttcagtgaggaagtttgaaaaggttaagtgacttggctaaggtcacccagccagcaggtggcagaattaggatagcaccctaattctgtggatcccagagtttgtctctctgtttctcctgcaatattgttttctggcagcaggcatgcagcgtggactgaaacactttggtatcggcactgccttgacagtcagataaccctggaatggaaaaggatatggtcaattggggctggctgttatgtttcctctcttacttcctgccccattctccttcttctatgtgttcttggctctgcaaggactaatatactgtggggtacattgaactttaacagtttttggtgttggtaaaattacttaggtgaaacataaaaccatgttcattggacattgaccaaggatgccatggatgctcctttttttttttttttttttttttttgagagagagtctcattccgttgcccaggctggagtgcagtggggcaatctcggcttactgcaacctctgccttctgagttcaggcaattctcccacctcagcctcccatgtagctgggattacaggcgcatgccaccatgcctggctaatttttgtatttttagtagagacggggtttcgccatgttggccaggctggtctcaaactcctgacctcaggtgatctgcccgccttggccttccaaagtgctgggattacaggcgtgagccactgtgcccggctatgaccaaggatgctcttatggaaaagagtaaaggtttttttttttttttttttaggagacagagtctcgctctgtcgcccaggctggaatgcagtggcacaatctcggctcactgcaacctctgcctcccaggttcaggcgaccctcctgtgtcagcctcccaagtagctggcattacaggcgtgcaccacgatgcctggctatgtttttgtatttttagtagagacagggtttcaccatgttgaccaggctggtctcaaactcctgacctcaggtgattcacccacctcagcctcccaaagtgctgggattacaggcgtgagccaccgtgcccagctatgaccaaggatgcttttatggaaaagagtaaagttatgtaaaagtggctgcatcctggacatcccagggatgcaaagtggcactccctaggggagtgtgggccaggcttccttcttatgaacagtactatgggcagcttgtggggatggatcatagtagggtgggagcatgggcactgccttgcctttcaggtgtcggtggacagaggtgctgagagggctgcactggccagggtgtccgttctgaggctttgtggtgggaggagatgtcttcttgagagaggccaggttgctgctcacagagggatgtgtgagtcaccccacgtgcccctagtttttaccatcttgtgtctgtactggttaagctaataggaaccacattttcctacatgaagatatcaagtctgaaacttgggtgtgtctttgctctgcatggctgtgtcttcttcctttcttctggcctcaggtgcaaaccctcttttgatgccctctttttttcagtctctgcctctccttgaatcactttcaatttctgctcacaacttttctgccccttttggttttggaaatgccacaaaaagtataatcaagtattaattctgcaaaggagaatgaagttgactgtgtggagatatttcttcttgtgtccatccctagcaacctcagatgactttaacttgaccctgggtcctgccaggtgactctgtccccctcctcctcctcctctccccttcccatctccacatgcttgaatcccactaatcatttttgccccttgtttacaaaataaacaagtatagacataagaaagcagaaaaaacataattgttactcaaacctcaggagccatagcaaagctcttcacattttgggagtttccttgaatattttttatgccttttttttctgctttcttacagagtaagttcattctgagtgacctattttctgtgtggctttttttgcttcattctttgtcatgagcactttttcatatcgttcaaaattctttcatcatctttcatggttgtcctacttaccttctgacgcacagttcctatacgtgttccttctgtctggaagccatcccagttgacatattggcttccgtaggactttcagaaccgtcactgtcgcctccttttgtgaagcacatgtgggagcagtttcatccctgacacactgtgtctctagtctcctggccttccacgcctctgcctggtagccatgagggcacatcatgcatttgtgcacatcacatacccaccgaacggctctggaatggaatagaagctgattgctttgataagaaggaaccgggggatttgtagacagtaattcttttcgttgttgttattgtttttgttttttgagacagagtctctctctgtcaccaggctgagtgcagtgatgagatctcggctcactgcaacctccacctcctgggttcaagtgatcctcctgcctcagcctcctgaatagctgggactacaggtgcgggcaaccacgccagctaattttgtgtatttttagtggagatgaggtttcaccatgttggtcaggatggtctcaatctcttgacctcatgatccgcccacctcagcttcccaaagtgctgggatgaaagccatgagccactgtgccaggcctgtaaacagtatttctgtgtgtgaagatttctgtaaaagggccaaggctgatggctcaatgcccgtaatcccagcactttgggaggccgaggcaggaggatctcttgagcccaggagttcaagaccagcctgggcaacatagtgaaactccatctctacaaaaaatttaaaaattagctgagtatgctgccatgcacccgtgttcccagccattcagggggcagaggcaggaggatcacttgagcctgggaggttggggctgcggtgagccgtgatcacaccactcactgcactccagcctgggcaaaaaagtgagactctgtctcaaaaaaaataaagatttctgtaaaagctgatttctgtctctgtcttaattcatgttgaagggtagaaaatggtggctttcctcaattcttgatgctggttttctctctcagtgctcagagtttgagatggccagggaggagctacgtgtttgcagccagggtaaaaatgagtcagaccagaaggcttaaatccctgtctgagaacatttagggccctcaacactgttgtgttacagatacaggaagccaggtctgtgcttttattcatcgtcatgattcagtcagatatgcagatgtttctcttttggggggattagctgagccagtgccacctatgatggtttgcatatgtggatgtttatctcagtttctacctgaaaaagctaaagccattgataatatccaaggtgaaaataattaggagtggacgaccttccacccacaacttaacttcatccaattaacagggcattcatcatgaggtaataagcctatttatgactgtttggaagatcaacatctttaaaagtctctggtgcttaaggagcttacagaatggagacagttactctaaaacaaagacctgcaaattatggctgccacctacatttttttgtaagtaaaagtatattggaatcgccacactgtttatatatcatctgtggccgcttttgtactatagtggcagagttgagtagttgagatggagacctctatggctgcaacacctaaaatatttactctctggtggttttttgtttgtttgtttgtttgtttgttttctctgtcacccaggctggaatccagtggcgcaatctctgctcatggcaacctctgcctcccgggttcaagcaattctcgcacctgagcctctcaaatagctgggattacaggcacctgccatcatgcctggctaattttttttgtatttttagtagagatggggtttcaccatgttggccaggctggtttcaaactcctgacctcaagtgatccacccgcctcagcctcccaaagtactaggattacaggcgtgagccaccacgcccagcctggtgttttattcaaaaagtttgttgactcctgctctagaaacatcggtgttcctctgaacctagccatgactttttctatgggtttttcaagccttttcatttgtgtgtctcacctacccccagccttcacccacctttttttttcctaattggtcgtaacatagaacttgagtagagtcttagctgctaacattttgagcacttactagatgccagatctgtgcaaggttctagtcatgtattgactcagttaatcctcatgataacccatcgagttaggtacactttacaggtggagtcccatgggtaggaagtggcagagctcagatttacatgtagacagttgggcccctgccagccgtgcctgtgactagaactctaagctgcctcgcaattgtgcttttctcgctctctcaaaacctaaccaaattatgtgtacgcattttttacaagcctgtttattttagagtatatgatacaatgatgataatggataaataagacctggaaaagcaagatgataagaaaaccaaggttgggttggggcatgggggtgagctcaagagaacatgaggtacagaggctgtgagaccatttagttgctggagctaacttttaagatctttagctctgaatttcttgacagccagatgataaaaaggagacacagtcatgtaagtagcacttataaaggaggagaaaagaactttgccagtatttacaaagcttttcttagcatttatctaaattattgcaaaaggaactttcatggaactcatcaatgggagttttctactcttgtaagcagcaaatacttcctcttccaggatggtttcatgaccagtgaagtctctgtcctgggcatgcgtgctacagtctgttttacttcttgaaccccaaatctgaaagtattgccagagggatcctctctgagagaaggatcattcatgaaaccttgtgggaggcaggactgtgcagataatgacggcagcatttaattcatttttgtcactcaccattcttctcccactctccaactctgcacgtggatgaaattgagctgttggtgatgtcaaatatgtaggaatatcctctacccattcccttcccaagttcagagccttttcttctagagctacctcgggctgtccctccaaggaaccttccctaacaatctctcccaggcactcaggctaagcacctcttttctgggactcacagtttcttgtgcttacgtttaaagatcatgtattcccaggatcacaaatatttttgtattatgtgcatgttaaaatgttatggttgggtattttttaattttttataaatgaaatatagcatacatacgtaaatgcgcagtatgatgaatcactatggtgtgaacacccacataaacaccaaccaaggtcaggagacagcacgtggccagtgccctagaagcttcccaggtgtccttgttgatcatacaccatttcgtcccactgtcctgacgcttatgaccatcagttttctgcttttctttatacttttaccacctatgtgtgtactcagactttatagtttggttttgattgttttgaattttctctaaaggggattgtactgtatgtatttttcagtgtcatgcttctttcacttcacattatattcctgattctttggtgtattgggtagagctgaagttcatttgttttattgcttcagagcaatgtttcttaacctgattttttcatcattgcccccaaggatcccttttaaactttttttctaattgccttctcctctccaccatgaaattttattacctgagatattgtatattggtttatttgctctgtgtgtgtgtgtgtgtgtgtatgttttatataaataaggaataattttttttatccccaaagcatcaatttttacccccttggggatgctacccacctcactgggaatgcatgcttcagagcagggaccccaccctcagcactattgccatgttgcacctgataattcttcattgtggggcttccctgtgcactgtgggatgtctggcagcatccctgggcctctacccactggatgccatgagcatgtctgccgaggtatgacaacctcaaacatttccagacatagccacatgtcccctgtggggctaaagagctcctggttgagaaccaccgatgttattgagcacaaactgaacaccggtgtgtgtgtgacagcaggtcaaataaacatgctgtgtctgtccctggcattcacccttcttcttattgccatggagattttgcatagtatattaagggaaaacacaattacaattggtgcatataatatgccagttttgagggaagaaaacactgctgtatattatttgcgtatatttggggagtgtgtgggtctgtgtaaatctagacggctgtatactaaaatgcttgcagtgattatctctgggcaatggaattaatggatacttttcctgttttcttttcatttttctagcatttctaccatgggaaggtattatttatgtgatgtttaaagtatctactttctattctagggaagaataccactacaatctgaacaccagtttggtgttttttgtttttcttatttctcagtggtgggagagggttaataggaggtaaacttttatggtgaattgttggtgttttttcttttagtcagttttgaggtctgagtgaaggaaatttttccggcagtcattaagccttgtcatcttagcagatgctcagatattttcccacacaaaagcttgcattagggtggctacattaggatctcctcatttttccctgctcttttttcactcacaggttgaaaatgaatatggcagctactttgcctgtgattttgactacctgcgcttcctgcagaagcgctttcgccaccatctgggggatgatgtggttctgtttaccactgatggagcacataaaacattcctgaaatgtggggccctgcagggcctctacaccacggtggactttggaacaggttggtgtttgtagtaacagaaattgcagcttaaaatcagctttttactcagtcagttgctctgggcagctgttgttataagtgtcatgggcagattgagatttttcatgttttcatttttcaaggaacaggtagaatagaatacttgcacccctcagtaacagagggttatctgtaggccaagagcttccagggtagctgcattttcagcactggtggagctagcctggaaaatggagtactgctatctcaggggctaggctggcccacccaagatgaagaagcaggtaggcatctccagctgtgagaagctctaccttgaggcagtcaccttttaggctgtgtctggggcgcgcttctctgctctttctgccctccctgtcctcccacctcggcaggacactcggggttatgccttggctgtagccaaccttgaggtcagccactggctgggaacttaccttatgctttgttgtctttctgcataacttagaacactgaactgtcagggctggaggtggtttggcagatgctacaaaggctatgccagattccttacacagtgctgtgtaaactgtggagatgctgcaagtgaaagttacagatgggtgggcaatgtggttaggatgcttctggccataagtaatattaagagagacttcatttaggagagtggctttcataaaggatatgacagctgtattcgtccattcttgcactgccctaaataaataccagagactgggtaatttacaaagaaaagaggtttaatggactcacaggctgtataggaagcctggtggcaacagcttctggggaggccttaggaaacttaaaatcatggcagaaggcaaagggaaagcaggcacgtcttacatggacagagcgggaggaagagataggaagggaagtgctacatacttttaaacaaccagatctcataactcattcactcactatcaggagaatagcactgaggggatggtgctaacccattcacaagcactttgcccccacgatccagtcgcctgccaccaggccctacctccaacactggggattatagttcgacatgagatttggtggggacacagatctaacacagatccaaaccatatcaacagctaaatgtctgactggactttttttgtgtgtgtggctatgaaagacattattgagaaattgcaatctttgaataaagtctgtagattagataagagtactgtatcagtataatttcctgatttttagaagtatattgtgtttatttaaagaatgcctttgttctgagagaatgaacactgatgtatttagggataaagggccatcacatctgcaatttattctcaggtggctcagaaaaatgtatatttttatagagaaactgatagtgtatatctagtaaaatgctaacaattgggaaatctaggtgaagggaataggagagtttttttgtactattcttacaacattctgtaagtttgaaatcactgcagaataaaaagttacaggctaggcatggtggcaagtgcctgtagtcctagctactagggaggatgaggtgggaagatcacttgagcccacgagttcaaggctgcggtgagctgtgattgtgccactgcaccccaagctgggcaacagagcaagaccctgtctcaaaaaaaaaaaaagatacacacacacaaaaaagaccagttccttgagtagcataaagaccctgatgttctcccctctgaggtaaaaggcacttcatgtgcattgcacagccaatgtttgcctctcttaagagggatgtacagaagactgaaatgaggaaattagcctggtgttgcctttttttttttttttnnnnnnnnnnnnnnnnnnnnnnnnnnnnnnnnnnnnnnnnnnnnnnnnnnnnnnnnnnnnnnnnnnnnnnnnnnnnnnnnnnnnnnnnnnnnnnnnnnnnnnnnnnnnnnnnnnnnnnnnnnnnnnnnnnnnnnnnnnnnnnnnnnnnnnnnnnnnnnnnnnnnnnnnnnnnnnnnnnnnnnnnnnnnnnnnnnnnnnnnnnnnnnnnnnnnnnnnnnnnnnnnnnnnnnnnnnnnnnnnnnnnnnnnnnnnnnnnnnnnnnnnnnnnnnnnnnnnnnnnnnnnnnnnnnnnnnnnnnnnnnnnnnnnnnnnnnnnnnnnnnnnnnnnnnnnnnnnnnnnnnnnnnnnnnnnnnnnnnnnnnnnnnnnnnnnnnnnnnnnnnnnnnnnnnnnnnnnnnnnnnnnnnnnnnnnnnnnnnnnnnnnnnnnnnnnnnnnnnnnnnnnnnnnnnnnnnnnnnnnnnnnnnnnnnnnnnnnnnnnnnnnnnnnnnnnnnnnnnnnnnnnnnnnnnnnnnnnnnnnnnnnnnnnnnnnnnnnnnnnnnnnnnnnnnnnnnnnnnnnnnnnnnnnnnnnnnnnnnnnnnnnnnnnnnnnnnnnnnnnnnnnnnnnnnnnnnnnnnnnnnnnnnnnnnnnnnnnnnnnnnnnnnnnnnnnnnnnnnnnnnnnnnnnnnnnnnnnnnnnnnnnnnnnnnnnnnnnnnnnnnnnnnnnnnnnnnnnnnnnnnnnnnnnnnnnnnnnnnnnnnnnnnnnnnnnnagggcatcaccagaggttgcagtgaggccagaagattgcgccaagacacatccagcctgggcaacagagcgaaactccatctcaaaaaaaaaaaaaaaaagaaaagaaaaccatgacaaaaaccacaattacttttgcaccaacctaatacaaagcgctgcagaggaagtgacatgccggtttcctcctgctttggccaggcttctcatcacagcgatgaaaaagcacggcatttttctgttgggaggaacaaattgaaggtgattatgattgtgttttaagcataatttgtatgtgaggtgacagcgtgactgtcactgctaggggttggagaatagacaaccacaaggccagggtgcctggggcagatgggccctccagtctgaggcttttgccagcttcattgctttgtgtgggagaggggcattgcccgatgggtctcatgagaacagtgtttaaagagctgaatgccacctaatgcttaatagtgagaaagacagccaatgagattctgctctttctcaatcagcatattctgtcctgaaagctggccttacagagaagccaaaggcccatctcagagcaagtggttatcagagggtcttggctggggccacgtccaccctgggatacctgctgtgggaactgggttgtgaagtgtggggctagggcattctctgctcgggttggtgtggacactgctcatgcttcctctttccccagtgtttggcagcccattccttctctgtggagaaattcttttttgttttagaggaggaagggaaaatagaagacacgagaggcaagacaagacacccctaatgggacatttcatgaggaaaacttgagagcaagtggtttggaatggctgatgtacaaattagaatccagagtatattccattattcaggggtaaacacaattagagcccccacatccctttgatttcttaattaactggcaaatatttgtggtagtatcatgtgtatggtgttattgaggctgtaagtatcttcaaaccaggctcatcctgtggggtgcatccaggtcaaccagatgttcttgtgaagagataagcccacaagatatgtgtccaggccctggggaaacacagataaagaagacaggcctgtgaagggaactcttgtgcagacaggaaaggccacggggacctcctcagagaggaagcaatgttctctggtccacacacatcttcaaatgggtccaatcagaagctagcttggaagtattccaggcccatggggtgtgggaagggaaaggggcctgtcttagtcagtgtgggctgctataacaaaatatcttagactgggtaatttataaacaaaagaaatttattgctcacagttctagaggtggtgaagtccaaaattaagatgccagcagattcagtgtctggcaagggcttgctctctgcttcaaaaatggtgccgtgccttcttgctgtgccctcacatggtcaggaagctccgttgagcctctttttatttatttattattattattttttttaataaaaaaaatatttttgagatggagtgtcactctgttgcccaggctggagtgcagtggcacgatctcggctcactgcaacctccacctcccgggttcaagcaattctcctgcctcagcctcctgagtagctgggattacaagtgtgtgccaccatgcctggctaatttttgtatttttagtagagatggggtttcaccatgttggccaggtggtctccaccatgccaggctggagtctgtttttataggggcactaatcccattcatgaaggtggagcccttatgacttaatcacttccagtggcctcacctgttaatactatcatcttgggtgttaagttccaacatgagaattttggggggatactaacattctgaccgtagcagggcttcaggcccgagtcccatgaagggctcttgttatttaacttcttgtcatttccacgactgacctaccttctccctcttacaattttcaggcagcaacatcacagatgctttcctaagccagaggaagtgtgagcccaaaggacccttggtaagaatcgagggtgaggtgtgtgtttgcagctgttaagagagaaaagttacatgctgctgaaactgggcagtaggcccttgatgtttttggctctggagtcagcagctaatgggattgtggagtcatagccattctggacatgtgaatgacagcagaaacaatgtttctatttgaaattgagctcctgcactggggtggaacagactggggaccaacatgaatggcctgttacacatcaggttctgtgctcctgcatcctggtctcatctggtcctcagggcaactctcataagtggtcttattgtctccatttttattgaggctcagggaacctatgtcacttgccagggtcatatagccagtgtgtggctaagccgggatggttggcaagctgcaggtgggtgtcaacaatctatcaatccttctctctccgttcttcccgtctttggctgaagttgctattcttgttgtcactcagcccagtttaaggggttaatatcctgcgccttctctgcactaggtcagactgccccacctgtgtacaagcctgatttataaaacagccttttctgagtctagtctctgcttagtgagcagtgcagaccctgcattcatagactttgggtggagctatttcctggaacctaaaacaagaagtccccacaagaaggtccagacttcttttttgttctctagaccaaggcttggcagggcaatgcccaagaaaaacatgaagtgtttgaggcctgctttgcagaatactgggacaagccttcctcgttataaatcaacctgagatctgaaaatctggattcatacaaaggttgaatttggagctgttatttatttatttatttttaaatggagtctcactatgttgccagactgtagtacagtggcgcgatctcagctcactgcattctccacctcccgggttcaagcgattctcctgcctcaggctcctgatagctgggactacaggggcgcaccacgatgcccagctaatgtttgtatttttagttgagatggggtttcaccatgttggccaggagggtctcaatctctagaccttgtgatccgcccacctcggcctcccaaagtactgagattacaggcatgagccactgcgcccggcctggagctgttattctataaaaatattttgctacccagtttctttgcccaacaagactttcctactgtgtttaaacaggggatcagctatctaaattttaatataggcaccacttttcaggaatacttgcattgtataagatgagatctactttaggttagaacctgaggactgaacataggcattgctggtattggaagtgctcactggggggcggctctgggttaagcagtgcatgtcagcatgtcaaccccctttacacctgtcatagatggggcattgcagggaagccctggcattggaaggtcataagtctatcctaagggctacgttctttttttgttttagatcaattctgaattctatactggctggctagatcactggggccaacctcactccacaatcaagaccgaagcagtggcttcctccctctatgatatacttgcccgtggggcgagtgtgaacttgtgagtgttcattgcctgaggggagggtgccctcagtagccatgggctcacagtgaagtaccgtgttcttttgtttccttgtaggtacatgtttataggtgggaccaattttgcctattggaatggtaagagcactttaatatctgtagaaacttatgctagaatgtttctgttgattaatttggggaggggtgtgcccacagacaattttattttcctttttttgtttatcctctcctaaattttcttttttttttctttttctttttcttttttttttgtagacagtctcactctgtcacccaggctggagtgcagtggtacaatctcaactcactgcagcctccacctcccaggttcaagggatcctcctgcctcagcctccaagtagctgggattatgggattacaggcatgcaccaccatgcctggctaagtttttgcatttttagtagagacggggtttcaccatgttggccaggctggtcttgaactcttgacctcaagtgatcctcccactttggcctcccaaaatgctaggattacaggcgtgagccaccatgcctggccctaaattttctaacatataaggattacctatgtaattttaaaaaataatatttcttacttttttttttttttttttttttttgagacgcagtctcgctctgtcgcccaggctggagtgcagaggtgcaaatcttggctcactgcaagctctgcctcccgggttcacatcattctcccaccgcagcctccagagtagctgggactacaggcacccgccaccacacccagctaatttttgtttttgtatttttagtagagacggggtttcaccgtgttagccagggtggtctcgatctcctgacctcgtgatccacctgccttggcctcccaaagttctgggattacaggcgtgagccactgcgcctggacaaaataatttttaagggaaataaatgtgagcatttagaagccttactgttttaaaccagggtagttgggcaggcttcagtcacagtctataactgtagcttatttgttcaaatattctactgtggtctctttcttttaacgttttgttttgttgaggtataattcacaaaccataaaattgacaatttttaagtatatgatgcagtggtatttactgtattcacaaagttgtgtaaccattaccattatctaattcagaaacattttatcaccccaaaaagaaactccatacccattagcattcattccacactctccctcctctcagcccctggaaataatatactttctgtccctgtgggtttgccaattctgaacatttcgtataagtgaaccacatatatacacctgtatgacttctttcatttagcccaatgtgttcaacgctcatccacgttgttgcacgtactagtgcttcattcctttttattgctgaatagtattcccttgtgtggatgtacagtattttatttatccattcattggttgatggacatttgggttatttgcacattttggttatagtgttgctttgaacattgatgtacaaggatttgtttgaattcctgtttcagttcctttgggtgtataccaagaagtggaacggctgtgtcatatggtaactctatgtttagagtttcaggaactgccatagtgtttcccaaaaaggccacaccactttacatttctgtatttttttgtgtaggaaaaattatgacaaaatttttctgtaacgtctttgatttttgttggttttttgcaaagacagatgatgctgtactggcttttcgctaagcttcatttcccacctgtctctttatttgcatttttctctctgaatcatggaggatgcccagctgttgagttttgaaggcttagtttgggcctaaatctctcaggatctgaaattggatactgtcagctcttaatgaagtttctcctttgaactgctatcttttttgcaggctgagatgggctaggagaagacatcgcttacaagcattatcaattttaatactattagtagagccaagaaatgaagatattgcaaaactcaaatgtcactgcatataagataatagtgtgcctggggcgtgtctgggtgggtgaggggagggagagcatcaggatgaatagctaatgcatgcagggcttaatacctaggtgaccaggctgggtgcggtggctcacgcctgtaatcccggcactttgggaggctgaggtgcgtggatcacgaggtcaggagtttgagaccagcctggccaacgtggtgaaaccttgtctctactaaagatacaaaaaattagctggttgtggtggcgctcacctgtaatcccagctactcgggagactgaggcaggagaatcacttgaacccaggtggtggaggttgcagtgagctgagatcgtgccattgcactccagcctgggtgacagggtgagactttgtctcaaaaataaaataaaataaatacctaagtgaccagttgataggtgtggcaaaccaccatggcacacgtttacctatgtaacaaacctacacgtcctgcacatatatcccggaacttaaattaaattaaaaaaaaggaaaagataatagtgtgccaaggttggtcactgatattttagataatccctctgtgttcatcttatgagaaacagttgagacctggtgggtgcctttttcacttagtagatggggattccccctagctgccattgatgggatcgggaccaatcatccgatccaggaaaaaaggcatcgtttttggaactttatggttcatgacacaattttttaaaaatcttactgttatacttaaaataacacattcatcttaaaaaaaaattggacattatagaaactgtcagaacataaatgttgtccttaatcctctctcctgcccctccctctgccataatccatagaattcccctttcttcctctgttgccttatttagcctgcatattagcctcatcttaattagagattatcagcaccacttttcagataagaatagctgaatacaaaaaaaagtccacacgttttctgttcagctggcaaggggtgaagcttggactggaactcaggtggtggtgagccagagtcactgcgctttggatcaccctttgcaccctggagcccctgagccagcccccacacccaccccactgtgttctgccaagcctccctgaagctgctttttgccctgtctctttgaggaagtgagagaaggccagtctgtacttagcagctgttcttcaggccagcttcctagaggagagcagggagagaaaggcatcaggagtggggagttcactgcccatcccacccacaggaacatgcacctgcctgtgcaggtgtgtgtctccttcctccacacctgtgtgtgtccacagctgtgtgatggctgcctacagggtccaggcgctcctgtacttctcacacaatgtggaatgttgatgaatgcaaagtctcaccatttctttcaccttcccacctcacaccctcttaagtggccagaggaggcttgaatctgcaccatttctctgcgatgctgccctttggtggtctaaaaacacccaaagtaagattctgccagtagaactagaacaaatacttagtcttccaatccatccttaaacccactggacagcttcccagcctgggctccctcggcctgtaaagtgtgcttctagaggtcacactttcccaactcaacctggcaaccccctccatgctgggctctggctaaggactcaagggcaagtgaggcacagtctctgcccctgaggtgcaagcagtgtagcatggagagagacataacaaataagaaacacagcacagcatgggtgactaccacattagaagcagacgagggccacaaagaaggtgagttccttgcagcaacggatgtgggtttttttttttctttgtgtctcacaggaagggatgtgttttaacctatgaatcccttaaggcaggcagacctgttggctgtgagttgtctctgattaataagaaatgggggaaatggtatgactagatcagttcagttggttgagtggtccagatctttcaaagtttagattctgtgcagagaactaatgaaaaagtctttggagctgacctgcttgatctgatcctcagccttgctcatctgtcacctccacaaccagtaggtcacccaaggtggctccatcattggtgagctgcatccaaggaatttattactaatcctaggtaaactatcatgttttgtgcctcattgatgtacaaattaggttggacaaaagactattcctaaaataacttcattctcacacacttgcattgcaatatgctctctgaagtagaggaggaaggcacaaagccttgctggtctatggatggcagcatcagcgtcacctggacacctgttagaaatgcagtttcaggccccactccagacctgctgaattagaatctctgggatggggcttaggaatctgttttaacaagctctccatgtgacacttaagcatgggtaagtttttgaagtaccacccaatgttgcagacaacctcatacctgtgaacatcatccctgacaaggtcgggatcctctggtctagaccccgccccttgcacagtgactgcaggggcatttgtttttctagtccttttgtatactcagtgttggcattatccattggtctttgttgtaggtcaagttcccagggaaacagactctgagattacctggtagaaagcttattgattgtgctctctggagcaatgcctgtaggatagagagggagaagtggggctatgatgcagcttcacaagtggcctcatccaatcttagagggagctctgcagctgggttggctgttcgaggcacattggtcagttgttggatgtgggctatccctgagggttgtaaccttgggtgaggcagctcagcacaggccagcacccagagacggacacatctgagaaatgtcagcagacaacagccctagccgctgggagaatgagtgagtgccctggttctaaagggggatccaagaggtgcaccacagccccatcgacagtctttgtagatgcaacaaaggccctcggattatgtttgaacctctgtggctgatgtgggtctgctgtcatctcccgctgtgtttggtttaataagccctgggttttctgctgatccatggcctagtcatctgtgtcttcaccactgagcttttctcagccacagcttgaggacgtgaaaaagttcagagttgacaggattaacagtcagagatgggggtcatatcataagccctgccattactgcttgtgaggtgttagcagatttttgtggggagcttcagattccctgcttgtccagtgggggtgatacctgctagaatcacagctgtgagcttctgtagagagtggatggaaagagtccttggtaaactctaaggtgcctggtaactgctacctgtagaaagaaattccttcctctaaacgttgcatcctgagggtcacgtctgtgtctcccaacaagtggttttaatgtgtcttctagttttctctctctacagtgctgagctcatggatcccaaagaacttgtcccagagctgcaccatcagtaataactagtggcacatttttgtcttctaggggccaactcaccctatgcagcacagcccaccagctacgactatgatgccccactgagtgaggctggggacctcactgagaagtattttgctctgcgaaacatcatccagaaggtgggtgctttgtatgagctgtggtgggctgatcttggacagagcctcttttgaactcactgtggctctgtggacaacttcctgcctggagccctcctgtttaaaaggatggatgaagggaggcatcagctagacttgggtttgcatcttgtacccacgtggttaagagtgagtctatgagcagatgcttataggagagtaggagatataagacatgtatttaaaaactgcaatatataatacagtgttaaatgctacttacagattcacttcttatatggtgagaattcacccggggaaatttctgtctccattttcttctccttccaggccagattatctttccaaaagttcaggtgagaggtagggtgatgggagagaatgcacagatcctcttgagactatagccccgattaaggcagcatggatatatgggagcccctatccttgagacacagctaatgtacttcaatatcaaaagaggtaaagctaagctctggtttctttatttaatgcatcatctgaaaaaagtaagtttccagtaaccaaagtgtataagaattatttctcactagaaaataactccgtccttatttgcaagagagaagaagataaactattttcctttttatgtgtggcccaatatacagactatgtgatttcagaatgaggaacaccagattttgaacctggacactatttcttcaaccttaagccagttgtgtaaattccctttatataaaagtagaggtagccgtacttacctcacagacttgtacagtttaaaaataaatggcactcaataaatgtttgttttcttctttcatagtcaaataaatgaacaataattatttatttacctaaaaaaaaaaaagagtgagtctatgagcaaatcagtctactgattgttaatttgtaaaactgggattacagcatctggttgtgctgtaaagcttgaaaagaacgtatgtaagccatccaggacagttcctgacacatatatgtctaataagtggtagccgttaactattatttatcttaaatgtaagaaaatgtgtgtctacttaaatagctgatgtacataggaaaaaaatcttcagatactgtgaagcatggtgcagatgtcagctgtcagtgaagcttcatttttctatttggagcaagtgattgctgtttctggactgcatctgaactgcttagtcctgctagcgttgtacccttttgaggcacctaatgcacctaggtggggtttcctgtctctgctgtgggttaaaagaaaaaacccacagtttttatgctcagtcacctgagttttgaagttaaaaaaacaaaggttttctgcctataaatggtatggttttttttgttttaagtatgatgtcgttttaattttaagcatgtgttaaaatgaatattacaaattttttaaatataaaaaatacaatctagacttaccacacttataatttgtccatttcatctaaattttcaaatgtattgttaaaatgttgcttatgttattcctttattatgggtttaatctccacagaatttatagtaatgtctcccaagctctcccttgtatgtttgttctgttttgaagctttctgttcctatctttattatttccttcctttatttgaagcttagctttttaatgcagcctttcttcttttctaatataaatatttaaggttataaatttccttcaagtactgctgtggctttatctcgtaagttttgatgtgcaatctatttcttactgtttgcttctaaacatatctattttgatttctcttcaccattgatatgtgttttttaaattactggaaataagtactttcctgtttttttgatttctagtctttttgcattctggttagagaatatagtctgtgataccaatcccttgaaagctgctgagcctagtcttagagcctgacatacaccaatattaatggtcaatgtgcgcataaaaagaaagtatattttacagttgttgactatattctacatacatgttcatcagattaagtttattaatggtgccattgatatctttgatctgcttcctaattttttgtcagttcagtctactatttagtgagagttgtcctcatgtatttccctttgtagctctgccagttctgaggttatgttattaggtgggcaaattgagaattacatccttcagtacttaatagtaaagggattatataaccctctatttctaataaggctttttgcctggaagcctttttttttttttttttttctttttttggtctgttattcattaacaccatttacctgcatacttttgcttggtatttatttttctgaggtatctttcccaatgctgtaatttcatcctttttatatcctttgttctctttacatgtgtcccttataaacaggatataatcgaatttttaaaatatctagtttgaaatttcttgtcttttaactgatatatttatacattctcattcattgtacttcttgatatacgtagatgaatttcaattatcttattttataatttctattcgtttacctttttggctctttctttccctttattgctttcttttagattgaggttttttgttttgttttgttttttcctcttatttctttcccccctcttctactttggaagttattcactgcattctaatttttttagtggttaccatttaagtgtgacatctatacccccagaaaagaacaactcgtagtacacagctcagtgaatttaggcaacgggagcgcagccctgtgacaaacacatagctccccggaagcccctctaatgtccctctctagtcattgacacacatacccattcctgagctcacagctgtcctcacctctatcaccagagattcattttgctcgtttttaggcagcaagttcctacaatatacactcctgtgtctggctgtcttgtaatagtttaaaattaatcaatatctttactttctccatattgcatccctctttaacttactgtaactccaattacagccctcttgatttgtatgttattattgtcatgtattttaattctctgggtttagttttcatgtattttagttctctccttaaaaaataaaacccatggggcattactacaatggcttcagatagtatttcacttgacccacatagttcatttattggcaaatgatttaacaaacattcatcaagtactctgcatgcgccaggttgcagttttaggtgcttggtggctgtaggctttcctgaaaaggtggagctcaaacaaaaattttaaggtggtgagagagccatgtggcatatctccacctggacaagagcattccaggcagaatgcagccagtgagaacttgggaaggtatatggcatttttaaagactagcaaggaggccagtgtggctggagcccagtaaatgaaggggtaagaagtaggagaggctgtgcgcggtggctcacgcctgtaatccaagcactttgggaggccgaggtgggtggatcacgaggtcaggagatcgagaccatcctggctaacacagtgaaaccccgtctctactaaaaagacaaaaaattagccgggcatagtggcgggcgcctgtagtcccagctacttcggaggctgaggcagaagaatggcgtgaacccgggaggtggagcttgcagtgagccgagatcacgccactgcactccagcctgggcgacagagcgagactcggaaaaaaaaaaaaaaaaaaaaaaaaaaggaggagatgaggggtcagggatatagatggggaacagatcacatggagcattacaggccattataagactttggcttttactctgaatgtaatgggaatccattgaggagttgagcagagccgttgttaaagcattctattaaagcagattccagctgctgtgttgagattagaccctgggaggtgcggcaagggtagagtaggaagaccagttagaaagtttttgcagccatctcagtgagaggtgattgtggcttatgaaggtagtaggaactaggcagtttcagaatatattatgaaactagtgctaatataattttcagatggggagtatgaaagagaggagagtcgggtgactctaaagtgttttaaatggcaacttgaaggacagagttaccatttatgtggggggaagatcaggagttcagttttggctgtgcaaagttagacttgtgctagtatatgtcctagtggagatgtagagtaggcagtggatatatgaatgcacagcttgagacaaaggtctggtacctttgtcccaggaccacacttttctttatnnnnnnnnnnnnnnnnnnnnnnnnnnnnnnnnnnnnnnnnnnnnnnnnnnnnnnnnnnnnnnnnnnnnnnnnnntttattgcttcttctgcctgagtatattctttagaatttcatttagtaagcaagttatattaattcttctttgtctgaaaatttttttttcaccctcattttcaaaatgcagtttttcttttctttctttctttttttttttttttgaagacagggtctcactctgttgtccagaatgagtgcagtggtgagatcttggctcactgcaacctctgcctcccagcttcaagcgattctcctgcctcagcctcccaagcagctgggattacaggcgtgcatcaccacacctggctaatttttgtatttttagtagagatggggtttcaccatgttgaccaggctggtcttgaacttctgacctcagatgatccatctgcctcagcctcctgaagtgctgggattacaggtgtgagccaccatgcccggcctcaaattgtagtttttctagactgatagttttctctcagcatactgactttgggcttttattgttgctgctgagaagtcagtttactgtactctgtcactctcttgaagataatctgtctttcctcttggacagcttctgagattttctctttatatttgacgctgtatagtttctctgtgatgaatctaagtgtgactttcttttcgtttatcccgcttggtagttttggaacttgtggcttggtatcttttttcactagtcctaaaaagtttatgccattatgtcttcaaatatttgtttctattagataatttgttagaccttctgattctagccttcacagctcgtaatctctttttctctgtgcagcattctgattgccttgaaatatgttcttcaattgttgctttctctttagtagctataaattctaagattaaaacctttccattgaattattaaattatatttttcattctataagttcacattagcagttcgaattttactcagccatttttaaattctcttgctttttccttatgtatacatgttcttcttttatttctttaaacatactagagatacttctgttatatatctttatttgatcatttcagtatgcagagtctttctttgtctcattctgccttctgttgtttctgtgacctcttgttcatgatgtcttgtttctgcgtgtgtgttgtgattttgactgagctgaatttcttggaactttttgttgttgttgttgttgtcattgttcttagagacagggtttcactctgtcgcccaggctgagtgcagtggtgcagtcctggctcactgcagcctcaacctcccgggctcaagtgattctcctgccacagcctcctgaggagctgggactacaggcatgtgccaccatgcctagctaatttattttttattttttttttgtagagccagggtctcactatgttgcctaggctggtattgaactcctgggctcactcatggaacttttatctttaggaattatttgagatttggggtgaatgtgggttcttccagagagaattagcatttgcttctggcaggtaccagggaacattacgccttaaattaaaatcttaaattgagggattttttttgtactacagaagcagtgtgaattttagctacaaaatatatcagagggctgactgtgcatatgaattttcaaaggagatttattttctccctacctattgccatgtaacaaagtacccctaaacctagtagctcaacataacaaatatttattatatcacagtttctgagggtaaaggatctaggaacagcttagatagatgttatgtctaagctactcctagggctatttttttatttctatcagtttatgcagtcttaaaaatcagcattttcaaaataccattccatatttgtatgtatgacctccatcatttcttttgaaaaatcacctgtcactggttttcctttgatggtataggtctttttttctctagtgcttttaagatttccttttcatctttgatttttaggaattttcctatggtatgcctatgcatagttttctttatatacatcttgtttgagggtgtttgaacttcctaaatctatggcattatttcttttgtggattttagaacattcttggctgttatctcatccaatgttatgtttacttcgttctcccaccttgcctttcagaacaccagtgatatgtgtgttagacgttttttcctgtgttctgtgtatctcctaagcgcttccattgtttctatcctttcccccgaacatattttagtttagattttattctgacctatcttctagtttattaatcctcttttcaactgtctgagtgaaacccatattatagactcaatttcaatgattgcatttgtcagttctagagcttccattagattttaaaaattgtttccagttctctgctgaaattcctcatcttgttttgttgtatgtttattggcataattttaagctttcttcagattattccaataccatgatgtcttatgggtctgtttcaatggcttttttttccttttttttttttttttttgagacagagtcttgctctgttgcccaggctggagtgcagtggtgtgatctcagctcaccacaacctccacctcctgggtttaagtgattctcctgcctcagcctcctgagtagctgggattacagctgtgcaccaccacacctggctaattttcatatttttagtagagatggggattcaccatgttggtcaggctggtcttgaactcctgacctcatgatctgcccacttcggcctcccaaagtgctgggcttagaggtatgagccactacgcccggccctggcttttttttctattcgtttttgatcagatagtgttgtctcctatatgttgggttttttctcatctagaggtcaataaaacaaaaaagaaagagataatttgggttatatatgttttttcttccaaaagagatttacttttacttctaccaggcagttagagtagacagagatcatcttcatgcaatcagggattaagctaatttgaaagtgggcttctgtcttcttgagggttggtccgcttctggttcactttcttaggggtctcaactgagagcttgaagtatttaccagggttctttctccattctgatctctgaagtccaatttttatcttctcagccctagaagactcccagaagttgtgttcggcttctagcctctcagttggcccttgtgaattgacaaataccttgatgggaaaactagtaacaaatatcagacttgcatcatgacattttccatttttttggaattgtaaccacttaattcctttctgctttggtagctttctgatgctttcaaaaagatattttaaaacatcttgtacaattgttctagatgttttccacagcaagatttgtcaacaaaaacctagtttcagagatttacttactccctaagagattctccagaatttgctatacacaaaggtgttaaccttcagagcacagggcaaacctttcacaaattatttttctgagatctgtcgatcatccacttaatcattatacaaacattcaacaccagtcttacaatttccgtgttaaatgctagaggtgagtgataagtctaccatggtcctgtgttggaggggctcacagaagagataaatttgaatttttctctttaagcatccctcttactccagagtttctccaaatagaatgaaatcatctttaagcaagttttaaagatatggcagatatgcaatttgttacctctctcaccaatctgagccttttttttttttttttttttttttgaagagtcgcccagtattgtgtgagaggtagagtcacagattggagaagctttggagagagacagaacaaaacttgagtgttgactccagtactcagtgggcaaggtaccctccttccacatctgtgcaatacggttagcatgtcttctcagagaataatacatagcagttatttttattactgtttttcttcacttatgtcattgtaaaatttcaaactagagttaaatattcccctggaaacttgtgcccacttatgctcaaagcctctgttgacagtgccctttagtagctgcagtaatcaccattgctcaattgctcccaagaaaatcaaggaggaagtattattctgccattctattagtttttatgtggtgtccagacccaaagggtatcctgttacagagagtgtgacatgagcactgtagttttttctaggtaagagttactgttccatgtttagtttgggtgtcttctatcagccaggactactgatttacttgatttgattataatgcctgtggacttgtttcttttatagactattgcttcatttcacaatccacttcaggtttatttattttctaaacagatttgttgaggtataattcacatacatttctcccattcaaagtacaccattcaatgttttttgttatattattaattttttaggccaggtgtggtggctcatacctgtaatcccagcactttgggaggccgaggcaggcagatcatctaaggtcaggagttcgagaccagcctggccaaaatggtgaaatcccatctccactaaaaatacaaaaattaggctggcatggtggcgcacacctgtaattccagctactcgggagactggggcaggagaatcgcttgaatatgggagtcagaggttgcagtgacctgagatcacaccactgcactccagcgtgggtgacagagcaagactctgtctcaaaaaaaaaaaaaattaattgtggtaaaatatatataaaacaaaatttgccattttaaccatatttaaatgtaaattcagtgccattagttatattcacaatgttatacagccatcaccattatctattttcaaaactttttcttccttccagacagaaactctgtaaccatgaagcaatagctccccagtcaccctctcctcagcttctagtagctcctagtctactttctgtctctgtgaatttgcctattctagatatttcatataagtggcatcataaaatattggtccttttgtatctggcttatttcacttagcacaatgttttcaaggtttgtgttgtaacgtgtcagaatttcatttctttttatggcttaatattccattgcatgcgtatatgatattttaattacctattcattttgttcatctggtgatgaccatttcagttgtttccatcttttggctatttgaataatgctgcattgaacatcagagtacaaatatcaatatggataagtctctgcttgtcattcctctagggacatacctagaagtggagttgctggtaggcttatttttagaattattttctttctgaaatagtgaactttcctaatgtggaaaaaatcaaatcaagttttaaaacacatatttacataagctttattgcataaaatatcactttacttttggcctcattataacagcacatttttattctctcatacttctagctacttcttcctgccatcccctatccctgaaactccacacacttttcttgaccttcccttgctcttctgatcgatggctgggataatcttacaccatcaccctcaatccttctgtatgcagctgtttaagaggccctgctctatgaaccactgctgggaccattctgactgtcacactctggaaccagagccaggcagaagaattttaaacttcagtattgactggccaggaagggatcttacttccaatctgatttggatctttcatgatctctagttctctttttgccctttgtcattccttcttctcactgtatggtataaaccatcacccttacactttatcctaatgtacaggtgacactgtctcctacttcaccaagaaaataaatgctattgaatacaccaagttaaggagcttgaattataggtaatggtgcctttgaagtagtttaaagaagaaaatgatataatcggctatgcatttcaaaatggctattggatgaggcaacaaaaaggaatgtgtagttagaatgaatcaagaaatcattacaaattccaagtgtcttagtcagtttgagctacaataacaaagtaccatagactgggtggtacttatggttctgagggtgaaaatgccggcatggttaggttctggcgagggtcctcttccacattgcagagcactgacttctaattgtatccttaattacaaaaagggggctaaagagctctctgggatctcatttaaggcactaaccccatctcaaagtccttaccacataataccatcaccttaagaattagaatttcaacatatgagttttgggaggacacaaatgttcagtccataacaaaaagattaaatgattaatcacaaatatcaccttttttttttgagacagtgtcttgttctgttgcccagggtggagtgcagtggtgcaatcatagctcactgcagcttcaaacccctggactcaagcggtcctcctgcctcagcctcctgagcagttagaactacaggtgtgcgccaccacacctgtctaatttttaatttttttgtagcgatggagtctccctatgttgcccgggctgctctcgaactcctgacctcaagcaatcctcccaccttggcctcccagagtgctggcattacaggcatgggcaactgcgcccagcctacaacatttttttaaaaacatcatttggttttattaactgcttgaaacttctaccattcttcattccttaccttttgtttatttttttaataagcaatatgactttatttagtgactttggaaacaaaacctcccaaataatgcctgaacccaaagttacctaaaaatggctaaaaatattttaaaataatagatttgaacatcatttgtagtttctgcctcataacatgaatgctttcagctggacagtagattacaaaccatctctgatcatgttaaggcagattagatgatcagtcagtcctggagctggcaggtgggaggctctgcctgtcttgtcactgcttgttatgctggccctctatgactgaagctgacacagagccctggcccttgttgacatcactgatacacacccactgcccatcaaccaactgcttcctcagggtcaccttattgtctccaccagagatggccaatatgttggctgtgatggacctgcccgcatgctacatgacatcattgaacttgtgcagcaatttgggagaccatatatttcccaaggcatcatcacaggtccagatgaacacacgaccatcccaggagcagctggcaatggtgctggtgggcaggctgatggagggggcccaggccacatctcaaacccagtcactgtgcttccagcttctgctctccttccactggccatccttgaagaggttgtcacagccacctgatggaaacttcttgatgtaattgggtttctgcctgaacagctggtctatgaggcttccaggtacaacagcaggggcctagctgatggcattgcagccaatggtgtaagcgttgttgatctttttcacttcccattggccttcccctgtataagtcagcaggaagatggccccatctgagctcctacaggccaggatcaggccgtagtcatgggggacctagcatacagagttcacggaggagtcatatcctgaggggtcgtgggtcttctcccaggtgccgttttcctctttccagataatgactttccaatcataggagcacaatgccaggatattgccatatgtggggtgagcccaggccacttgccacataggactctcatgacttctgaggttggcaatgaggatctgccctctgttgtgcactttgaagattttgacggatttttctgatgagcaggttgccaggcgggtgccatagtagtccatctgggcatcatgaatcatatccttatgggaggtatccacagtgttaattactgacaccatgataccagcgtgactgctctagggacgtggcagctcctggtggtgcctccccattccttaccacctttttttttttttttttttgagacagtctcgctctgtcacccaggctggagtgcagtggcacgatattggctcactgcaacctctgcctcccaggttcaagcgattctcctgcctcagcctcctgagtgactgggattacaggtgcacgccaccacacctagctaattttgtattttagtagagacggggtttcaccatgttgaccaggctggtctcgaactcttgacctcaagtgatccacctgcctgggcctcccaaagtgttgggattacaggcgtgagccaccccgcctagcctcttatcaccttttttagcaacaatgtttgcctcttcagatggccacaatgtttgtaatcttttcctctagagagaatagaaatctttctttttagcctggctgattgaaatttgtttagtattgatagtttagaaaaacaaaagcttcacattttattactgataatattatataaatgtttaagattgtaatcaaaattggggaactatctctccagtttgttcatatatgagctgtaatttttggaagaaattttcacagacaggttctggccccatacatttcaaaccttgcttctccacaacccatgtacttccggggctgggtgcctttaggcataattgtattgcactatgatgctaagtgagtcagcacattgggtgaagggatgatccattattcataacttacctactcacggaagtaaccaggaatcatatcagtatatcctactgtacccatgtaaagtaaatccctactttaactgatttttacttgggtccccaaaatgcctatagcaacctgtaaaacctcccaaaggaagaggacatttgacacagggaagctggaacagaaagagacaaggatcttagcttgttatggtcaaattatattacttttgcaagttttacaaaaacatatgacactatgaacatgctggtgggattcctcccttggggcacttctggatgcagctgccatggtagcctaggaatgagatgacggcaggggcatcagggagtggagaggaagaaatcaatttgaaaaacatttagggctgggcacagtggctcttgcctgtaaccccagcactttgggaggccaaggtgggaggttcacttgaggccaggaaatcaaggccagcttgggcaacatagtgagactgtctccacaagaaaatttaaaaatttaaattaggaaagaaaagtgttcaggaggtaaaattgataggatttggtgattgactgaacacagatgtgagaaagaatgaggagttgttgatttttccaggttaaaaccttagttagataactaggtgggtactgggatcggcacctgagatagaggattgcagaggaggccctggcagggacaggggaagcaagttcaattctgggcttattcagctcaatatttccaggaacatccaggtagacagatttctccataagcaccaacacttaatagtaagacactccagggagaagtcggaaaggttggcgcagattctggggcgatcagtgcaaatggaagccgaagtccagggagaggttgagactgcacatggggagctgactgaggagggcaatgggccaagcaaaagacaaacccaggggatcccaagctttaacaactgggcagagtaagagaacccacaaaggagacagagtctttagaaattgccaggctcagtggctcacgtgtgtaatcccagcactttgggaggccgaggtgggtggatcacctgaggtcaggagttcgagaccagcctggccaacatggtgatactccatctctactaaaaattaaaaaattaggtgggcatgatggcgtatgcctgtagtcccagctannnnnnnnnnnnnnnnnnnnnnnnnnnnnnnnnnnnnnnnnnnnnnnnnnnnnnnnnnnnnnnnnnnnnnnnnnnnnnnnnnnnnnnnnnnnnnnnnnnnnnnnnnnnnnnnnnnnnnnnnnnnnnnnnnnnnnnnnnnnnnnnnnnnnnnnnnnnnnnnnnnnnnnnnnnnnnnnnnnnnnnnnnnnnnnnnnnnnnnnnnnnnnnnnnnnnnnnnnnnnnnnnnnnnnnnnnnnnnnnnnnnnnnnnnnnnnnnnnnnnnnnnnnnnnnnnnnnnnnnnnnnnnnnnnnnnnnnnnnnnnnnnnnnnnnnnnnnnnnnnnnnnnnnnnnnnnnnnnnntagtggagattatatatatatatatatatatatatatatatatatattttttttttttttttttttttttttttttgagacagagccttgctctgtcacccaggcaacttccacctccctggttcaagtgattctcttgcctcagcctcccgagtagctgggattacaagcgcacaccaatgcacgtggctaatttttgtatttttagtagagacggagtttcgccatgttggccaggctggtctcaaactcctgacctcaagtgatccacccgccttggcctcccaaagtgctgggattacaggtgtaagccaccgcacccagccagtgggctctttcttatgagactttgtagacattccattagctgatttgttaaatgatcttcaaaatatttgcttgcatcaagtaaaggaaattggatggtagatatcccctgtatatagctctacctgcctccttccttcatcaaagactcaaaaagcggaatatgtctcctctgtaatccatttcaagaacacattaggtggtgatgggcaatatatttcactgacatggactcctggggataatctcccagcaggctgcataagcctgtgctcagtggtgaaggcccccaggcggttgtcttcatatgaatcttcaaggcatggcaaagctcatgacatttgcattttaaaaggtatttgctttggtgtgggtaaaactcaaccaaacatggttaacactttgacctcgaggatgaaccataaaaatatagggcagcgacctcctcttccctactgattcctgagaggggcagtggtgagtttatttttgtatgctgtcaaatcaacttaagacccattttaagagttttgtttctgttctttatagggattccatcaacgtaagagttccgctgatgttttggaaatgggtcactgtagaaattaatcaagtggtagtgaggaccttgataattggagtggattctgggattcccaaaggtagtaactgggctgagtggtgaagaggggatgggagaacagccacagtgattttttctgtacttcaaaagcttaatgaagtttgaaatttgatccaggatttgtctacactggctgattgatcatcctgcactgtttatgactggaatgacattggcttgatacgcagacacagctgtctcttgctgatgtatagtgctggtgaaaaccagtgttttatgtctgatggttacagatgagaaaggcaatattacttagcaactgttaaatagtcttttaaagtgtcacctgctctcttgtagtactggtctcttcgtttcctgtagagttggcttttctagtccctctcccagagtgatttctctaaaacactgatgtgatcgcttctcagtcttttggctaagatcaagtgtagtatctaaaacactgatgtggtcaggataccttccatgacttggcccctatatttttccagcctcatctttcaattctcccttcttagatgtgacttcctggccttaagttggagctatatacaattccatgaatgaaacagcactgttcatacctcctggtctctgcaccctctgcctttattcacctggaaatgaagacacacctcagttaccttatctgcagagtcttctttgacccacttgtcagccaagttagtcacattttgttttctatcacttatgttgtagaaatcttttaaacattacttttcttttttttttttttttcttaacttttaggttcatgggtacatgtgcaagattgttgtgtaggttaactgtgtgtcacaggggtttggtatacagattattttgtcacccaggtaataagcatagtacctgataggtcattctttgatcctctgcctcctcctacctaccaccctcaagtaggccctgatgtctgttcccctctttgtgtccatgtgttctcatcatttagctcccacttataagtgagaatgtgcagtatttggttttctgttcctgcattagtttgcttaggataatggcctccagctccatccatgttgctgcaaaggacatgatcttgtttcttttttatggctgcatagtattccatggtgtatatatgccacattttctttatccagtctaccattgattgtcatttaggttgattccgtgtctttactagtgaaaatactactttttgtggtgtattaatataactgatttatacacatttctcactctctggaataggtttataagtctagtaccaagcataggacctgacacagagtactttcttaataagagtttgttggatgaatgtatgaaaacattagaggtcttggtgaaggaaaagctggtcaccattgaatctagtggattccacagggaaaagagcagcttcccgtgttgaatgtgtccggttaagtatgagaagcaacatttctgattgctctgaaaagtatgattaaagcacaaattattatggaaaaataatggtttagaagtatagcattttggtatatttgttcatttcttttctgaaacattaattagctaaggtaaagatgaggattttgctatatgataatcaaactagtatcaatgaaaatcatcaatattaaaatgaaaagttagaaaattgtagtaaatgggatagacagatgaaagcttaatatctgtattataatgagctaatatcactgatcagaatatcaagatctacatagaaaattgggtaaatgatgaccaggcgcagtggctcacgcctgtaatcccagcacttaggccgaggcgggcggatcacctgaggtcaggagtttgagaccagcctgaccaacatggagaaaacccgtttctactaaaaatacaaaaaattagccaggcgtggtggtgcatgcctgtaatcccagctactcgggaggctgaggcaggagaatcgctggaacctgggaggtggaggttgcagtgagccgagattgtgccattgcactccagcctgggcaacaagagcgaaactccgtatcaaaaaaaaaaaaaaaatttttgggtaaatgacataagcaagtatggatacttgatgaaaatgtgagtatacactattttaagagtcttatactcatatcctttgacctagtcaccccacactcagagtgttacttttaaaaaataaaaatttaaaaggataatgctatagacatgaagtttgagactccatctcaaaaaaacaaaacgagaaaaaagaggcgacatagggtaatatgctaattgatggaactaataaataaagatataaggatattattttaaaggtacaaagataactaggagagaagctgaaaatggtgatataaccataatagcaagaaaggaagataaactttctttatcttctgggctgtactctcatgtgttaaagaaatcaatgataagaaaaagcagtacacatatattacttagagaccagaagaagcaaaaataggaacaattaaataatcttaaaatgtgctgggcgtggtagctcacacctgtaattccagcactttggtaggccaaggtgggaggatcgcttgagttcaggagttcgagaccaggctaggcaacatagtgagaccccatttctacaaaaataaaaataaaaattagcaggtcatggtggtgcatgcctatagtcccagctactcaggaggctgagacaggaggatcactggaactcaggaggttgaggctgcagtgagccgtgattgtgccactgtacttcagcctgggcaacagcctatctcaaaacaaaataataaaaaatgataatttttaaatggcttcctctgaaagaactaagagaaaagtgaggcaggggactgttgcttttcactataacagtcttttgtcctcctctttttatttattttattttatattttattttttgagatagaatctcactctgtcacccaggctggagtgcagtggtgcaatctcagctcactgcaacctccgcctctcaggttcaagcgattttcatgtctcagcctcccaagtagctgagactacaggcatgtgccaccatgcctggctaattttgtatttttagtagagatggggtttcaccatgttggccaggctggtcttgaactcctgacctcaagtgatctgcctgcctcggcctcccaaagtgctgggaatataggcgtgagccgggtgtcacttttctggctggaaacctctgtggcctgtggcgcctttgcccgagttttgctcgggcccactgggttcgttctgcccactcggcctggcaggctgcactcggttcatgcttcctgcctggatcccatacctgccaagggcaagtcaggcataaagcggcaaggggtgtgtgagcaagcgtggggttgagccactgtgcacggtcagacacgctggctgctgctgctgcagggtgagcagctccaggttgcccgcacaggcgccagccctctgcaaggctgcagctggaccaggtgcactgcagacagcttctctggctggcatcagggtatgcaatagtgcccagaagcttggagatgccaggaaccacagggccccaaagagagagtcacagccccagctcgggtagctcccaggtctgggctccccaaaggaccatagctcttctctccttttcccccacaacgtggtgagcaaggggcatgtttcagccctatttgtgttacagctcttttagcctcaccattcagcggatcttgagttcttgtcctacatccaggaagaatgaggtatacagacaagtggagggtgagcaagatgaagagtagctttattgagcgatagaacagctcagaggaggcccacagtggatagcttgtctccatagccagggtgtcccagcgagtgttcagctctcagcagagagggtagtgcctctctgtgggtagattgtcccatcctccctccatcctctcagcagagaggatagtttctctctgcagctgattgtctccccttgtctctccatcttctggtcttgctgagccagcagttgttatgggcttcagtggggaggaggtgctgcttggaccatggcggccattggcaggcccagggaaaagcaccacaagttacccctctggtccatgagactagtggcccgaaccccaggcttcgggccctccccagcttgaaggtggggcttcaccagggactcgcccccttccacccaggagcctgtctaccttctgccaccattcatggcgcccgggctgtttgtgccaagggacgcctacaggccagtgctgagctgccctcagcaccccctcggcctccctcctgtgctcatcggtgcccaaagtccagagggggctgaggtggcagggggctggcatgtcagtgctaccctgaacgtttgcacacccagccagcgtgcgacagcacgtgggctcagccccatccttgctccgaggtcggagtggcgctgggagaagagagaggctaggcagcgggagcagacacctcttagccttttgggggagggggaccttcctggatccccaagagtgcagagatgtttccgtctgcagctgcagcttggtagctgcagccacgcccagctcctgcttggctccatggatcgtggcactgccccgggcacagctctacctcggggcccttctctgtccgcccctccgtgcccaaccacgctgctcccccaccagcgggtgactcggcccagtcccatcgtggcgggcttcagggactgaccacctccttcctgctgcaccctttccacagcagcagcaaggcaagagcagtgacgcggggccagggtcaacagcggcagaggctccgggcctgggagtgggtcctgcctggccccgtgaggctggggacggcacagtcagctgcctcggggacatggggcacaggggtcctctccgccgccactactggccctgcagctgctcccaccgccacggcccacgacctccttccgccacagccagcgtgatggcagcagctgctcccaccgccacggcccacgacctccttccgccacagccagcgtgatggcagcagctgctcccaccgccacggcccacgacctccttccgccacagccagcgtgatggcagcagctgctccgggctacaaagaggcgatgctgccagcattgtgacttttagaaagggaaaccaaaaaaaaaagaaggaaagaaagaaatggaaggatcttgagaactcacagtacactctacttgaaaagccggatggctacagacatttctaagacgtgggactttctcccagatcttcttactccataattgtatacatacatgcacatatatgtgtgtgcatgtgtatatgtccagatataatatttaacatttaataaggatttattttgaaaaatagtttcagactttcaaaaaagttacaagaataaaagtagtttaaaaaaagaggatttgtggccaggcgcgctggctcacgcctgtaatccgagcactttgggaggctgaggcaggcggatcacctgagatcaggagttcgagaccagcctgaccaacatggagaaaccccatctctactaaaaatacaaaattagccaggtgtggtggtgcatgcttgtagtcccagctactcgggaggctgaagcaggagaatcacttgaacccgggaggcagaggttgcggtgagctgagatcgtgccattgcactccagcctgggcaacaagaccaagacttcgtctcaaaaaaaaaaaaaagaggatttgtatattctccacccggacttatctgtgtcaacattttactctacatgcttcatcactcgtgcatagacttgtttcttctctctctctgtctgtgtgtgtgttttctaaatcattggaggattgcatacatcacggcctttacctttaaatacttcgttatatgtttcataacaatatggagaagtattctctcttgtaaccacagtaaatttaacattgatacagaactttagcaataagattaatatttttcctatgataggctgtctcccttcagagtctgtcacgtacctgtttccttttttcctcccactcccctagccttctgctgtttaccctcattctctctacttgtttttgctcttttgttttgaggtctttcggtttataattatttggatattcctgaagcttaaaacacagacatacacttagaggtaaaaaatttaccagatcctgctttggaagaagtctctagttcctttgattttccaaaaaagcagtggcactgttgagtctttgaccttgctttcaaataataaattttatgaatatgtttctgaaggtttaccaactttttttcttttctctctttttctactctggtttatagtttgaaaaagtaccagaaggtcctatccctccatctacaccaaagtttgcatatggaaaggtcactttggaaaaggtaagaaaaaaaaataacagaaactttgaaagtgagagatgggagtgagaaagtggaatttagtagcagtgagtgaaagtgctgtgctggaggaattggttcgttatttttctgcgaatttgttttctgcaagcctaatggggtaaatgatgtttctgggaaaatggggagagagaggtgagaagatactcatgcctgttgacaggatgagcagatgagacatgggtgggagtagtaggcattcttggatcatttgggtcatcttggttcctttatcagtggtttaaacagtgtcaagtgcctttgtggaaataacatgccacctcattgttatggctgccaaggctctttgtcgtatttaccttttttaggagttccccaaaatcacaggcattttgatagacctctgccctaaattatatacttacctccatctcaaagtcatgtcctaatttttatggtctgtggtttatacgttaaatggggacactgggggaaaagctagaaatcaatcataaataggagttaagggcaatgtattctaggaaaagcgaaaaagaagagaggttttacttaatagtcagaggagtgacatagccaaagtcaatttgttttgaccatctgtgtcttcaggttttccccttttataatccctaactcctacatgtattaactcacaagaaaaaaaaaaaagaaccgttacctatttcttaagaatctcgatatcctaaaatagtatcgtaagtttttatcttcaagcaaaatgccaaacatgattatgtaatttttccatccaagaagccctttgacatggttggttggttgagttcttataacattttccacctagtgtcagatacctgtgctacattctacaaagaatgtggtctttctgtctgataaggatctttctttagattaatcagacttcagtcactcttgtaaagggagcaccttctacttgttcattgctacagctacttaaggaaaactttggtttgtttgtttcagagccatgacaaatctatttttatgcaacagaaaatagctccaaatgttcaaaacaacaacattgctaaaaccaagctagcttattaccaaaagcacattctgtttaccgtgaaggaaaattgtgtgagcagaaatgactttttatttttaaataaatatatacagttgaagatagcaaatcagcatataactgaattaagtttatgtagaacacagttatatagaaaataagtttttaccgtgagttgaatttcttagtgttcaggtgggaaaacacccatatgagtagctggcttgatgaaattgtaaatgagatttttttccttgatgctgcacatcagcaaggtaaccatgggaagtgtttatgaaattcctaactgggctgggcatggtggctcacgcctgtaatcccagtactttgggaggccgaggcgggaggatcacctgaggtcaggagttcaagaccagcctggccaacatggtgaaaccccgtctctactaaaaatacaaaaattagccaggcatggtgacacatgcctgctcaggaggttgaggcaggagaatcacttgaacctgggaggaggaggttacagtgagccaagattacgccactgcactccagcctaccagcctgggtgacagagtgagactctctcaaaaaaaaaaaaaaaaaaaaaaaaaaaaaaaaaaatcctaaccagtattatagtcatggaaaatcctggggtttggagccaaatctaactacaaatcctggctctgtcattactcaagtggacttctgtgagtctccacaacacagggacagtagtacctgcctcacagggtagctgtgagtattcaatgagctagtgcatgtaaaacgctgtatctcatctggagtgtgtagacaggcaatgactggtagctgttattattattgttgttattgcatcagaataagtatcctgggttgcaagaatacacaatcctttgtattgaatataataaatacttaccaggcatttactatgttctgggcattggggctgagaatggaacatatcttatccttaaggagctgacagtctggtgaggaagacaaagatgagcaactgaaaagtgatacaggcatggaagatatgccacacacaagttcagaggagggtgaagtaactaggaagtattaaatattaaggtgatataataatagcatgtctaatcttagttgaatgtaattggcctctggttactacttttacttcttagttgttttactcaggggtgttcagagagggtttataaggaggcagcatctgagccttcgttttcattcattttaagaatcttttataggtctctgagcaggttggacttccgaataggtatgtttgaaacctttttaagactactatcattcatagttttcatcaggagttagggagtagatggagaggactgaaggagactgggaagcaatactgagtggaatttgaatgatttaggtttatttaggggtttggtcaaacccactgatgtctttgataattagggaatgactctgtaacctgatgaccagtgaggggtgcagtgtgtgaatgctgcttttgtttcttttcagttaaagacagtgggagcagctctggacattctgtgtccctctgggcccatcaaaagcctttatcccttgacatttatccaggtgaaacaggtaggccctcaaaggtaatgcctcgccttttttctacttgcaaaagtgtgctttctgcactgccttgcagtgcccattctgaattcaggggccaaaatggtaagcaaatgcatcagatcccaggtaaatgaaccatgaatttccaggctctctttagcttgaagtgctgcgtgttgggctgatcatgcctatattttttgccccacttcttctcactcatacaggaggtagcccaacctgcttcaacataattctgtacaagttataaattgagttcactgaccaatctaattaatctttattactaggcatcagtggaagatcactgttttaatactcaaaacagacagtttaattatttgttcttagttcaatggcataaggactgtgttttttggtagactaggttctttgagattctttttcctgcttttgaagagaacagagcacatctttttttttttttttcagtgtttgtatatgtgtatgtgtttgatctccagacactgcctcatctttatttttttaaagtttttcccagcattttgttttggaaaattttaaatccaaaaaaagttgcaagaatagtacaataaacacccatatgctttttacctagattcaccaattgttaacagtgttttaattgcctttttctctactgtgtatgtagtcaactgcttttctttttctaaccatttgagttatcagcaccatgtcactccacagcatacatcttttaagaaaaagaacattatcctgcagaaccacaatacaatgatcacacatgagaaatttaatattgatgcaatcctattatctaatataaattctatagtcaagtgtccctggtcattgcaataacgtcctttacagcttaatcttttctcaatccagtttccaatccataatcacacattaattatattctccttagtcttcttccgtctgaaactgttcctaagtctctctctcatgacatggacatttttgaaaaggtcggggtgtttgtagactttgcctcactaattagattcagtaagacattttggacatgaacacaacaaaggtgatatgtccttctcagggaatgatagcaggatgcccgtgagaccagcttgtcccttaactgcaatgttaagcttcatcacttaggatctcagccccatgttttgaaatggaaggttatccacgtcctcctttctgattttctgtggcaaccaccttctggaaggagtctgaacagtaaggcaaaataataacagcatatctaatcttagtttagtgaagtttgctgtcagttcctgtttttacacctgtgattttattccaacaattctattttgcaataaaatgaataattaagtccccccaccacacacacattcactgtttcatgaacgttgtatagggtactctgcagtcctagcacccacatctataaatggaacttacctgcacttagcagagctgttgagcacttcagacaatgatcccagagcacgtgtagcctggggagggagttccaggttactatatgaacacgtgcagccattgttctttctcagaccccttctgctttctgatctttggccaaggtagtgctctcagattgggtggggcttcctgggccctggctctttcagatctggggcaagtccacagaatatctatttccagcaaaaaaccccaaagggcacagacttcagggagtggggctcagcctactgtctctgcagggatcccctgagcctcagccacacctgcctggggagcatcacagcttctacccctccttctggaagcccttgacaaagctttcctcagcccttgaggaaacttaccactttagctagttttcaaaataagtaaataaatgaaccagaaggagatggagatgtggagtctgggcgggaggtgttcttgcgctagaaggtttgtgtggtcttagtagcatttcttgtgctcagctcattcctgcaacacaggaaggtggattagtgctctcctcagctcctcccagtcacctttccacttgcctgaagtttactttctttctttctgggccctagaagtagggaaacttttctctgttccatgctggatctctatttgcattctgttccataactggatttatgtcccagctcagccctgctaataatgtccacagcaggaagtaaataagcaaagtcaataactataattctgtggattattatgtcaataactataatctgtgaataattccgttactgctgaggctgattgtttgaggctttccttttggaccagggatgtcagcatctaaaaatattttctgacttagtggttggttacaatctagtctcttaactgtttctttcccccgttcctccacttaaaacagttctgatggactttgttgttattattattattattagagatgaggtcttgctatgttgcccggactagcctcaaactcctgggctcaagagatcctccccaagtaactgagactacaggtgcatgccactgcacccagctcattgccttttgttttgtatgttaaagcagatttagcccatgaacttggagacagttttgctgagcagaacttcatctcttggctttgctgtttgtttgccttgtttttttgttggttttacttagttttgtttttggagctaacatccataacttttgctatgtatgatataatcccctgtatgaccctgggcaagtaacttaacccattcagggtccaggttcctcttatgggaaagggatgcttgataagacactgttcatggttccttgcagtttactattatgatagatattcgatgacctaaaaattaaaccagtttcctttttcaaatttaattttttcgggaggtggaggaagattttcattccttatggtttgagaaacatcgctttcatacatgtctagggtaaccaagttctctaaatgaatggcaatagtgatgtatttttcttaaatccttttctaaccagcattatgggtttgtgctgtaccggacaacacttcctcaagattgcagcaacccagcacctctctcttcacccctcaatggagtccacgatcgagcatatgttgctgtggatggggtaagaatcgtctctgaactgtgcgttttgtcccagtgagggtggggatgagcagcctgcacttgttaacacagcatttggggtctttgctcaccttttcagcctcaggctctacccatcatctttttttttttttttttttttttttgagacagggttttgctctgttgcccagcctggagtgcagtggtgcaatcacagctcactgcagcctcaacctcccaggctcaagtgatcctgctacctcggcctcccaagtagctgagactacaggggtgcaccaccatgcctggctaatgttttgattttttttgtagagacagggtcccactatgttgcccaggctggtcttgaactccggagctcaagtgatcctcctgcctcaggctcccaaattgctgggattacaggcatgagccaccacggtgggctccacccctcttcttggtgacccttagctgtgcctcttgcttgctgtgaggcctcatgcatgtgccatttgctgaaatccaccctacccaccatcttaacccagagggctgtgcttgatgcgccaccctctcagaagccttcggggtctccccagccaaggccgcccttctgtgactgatgttgcctgtgctttctttgctccttaagggtggggtccatttccaattcaattttgtacctgccactgtacaaagtttgttgaacttcgtgcctttatcctacatgagaaattatattctgaaggactgctcgtgacaactattactgaaatgcacaaagaaccgtgtttcataacaaaagcagatgcatttcaggacttccagtcctctcaccgaaatggtcacaggaaggaacacaggaaaagattttcttcaccaagaaaatttgttcagaagattttaaaatatttcccattctcttgtaatcaacagctttcatttcagtgggagcagattactaagacattctgctctattgatggtgactgtttcttcgcttctaacttgggtgttgtcttagtgaattatgatcattgtaaggtcaatttttaaagtctaaccttttaaaaagttaggaatatgttgttgataaaatacctgttgtttttcctcattctgttgtatgattttcgtggttaatgcatcatgtcaagtattttgaggtgagaatactccacctaacttctctgattttatctcttttgtctgattttgtcttatctctccatgttgttcagaagcaattttttgtgagtgacttttgtgctgtcagaacacgaagcagctactctagtaagaatcctcccctggaattttccactaaaagtagttggcagtaaaacattccagggcaaaggaaaccagcttagaccgttccatgctctgagctgtgtctggcagttttcctgtttaggaagcagtgattgggggatctttccgacctggccggtaacttgggctaagatgctatcaaagcatttctttccaagtctggtgacacttcaaggcaagaaaatgagtgctaaattaactgagcatgctgcctctccttgctgaccttcttaccctcaattcaattgtcatttggtcttgaaccccacagatcccccagggagtccttgagcgaaacaatgtgatcactctgaacataacagggaaagctggagccactctggaccttctggtagagaacatgggacgtgtgaactatggtgcatatatcaacgattttaaggtaggacaaaccacactgtcaagactaaggtttaaggggtgacaacttagaagttgaagcccagtacagtggctcacacctgtaatctcagcactttgggaagccaaggcaggaggatcacttgaggccaggagttcaagaccagcctgggtaaaatagtgagacctctacaaagaattaaaaacttagccaggtgtggtgacatgcacctgtggtctcagctactcaggaggctgaggcaggagaattgcttgagtccagaagttggagattaaaatgacctatgatcatgccactgcactctagtctgggtgacaaagtgagaccttgtctcaaaaaaaagaagtagttgagctattttgaagagctgttttcctctgtaggtgatgagaaagttgagctttgcaaacagaacctttcccctgtgtttgagtttggtcatcctatagaaagaaacagaaggaggaagcccctccaccatgcttttcctctgctttaaaagaccaccaagctcactgaaggcactcctttgccagtaaagccagctgagcctctgttctgccctgttttatgggtttggatggttagcctgtggcaaactcttcgcttgtaggaagcctcttctcttggggcactggctctcacctctgttgattactcctgtgtccagatgtgtagcccaaataagtttttctaacacatatttttagagcattattcagcaagcatttgttaagctcccactccgcgagatgccccaccaggtgctttggggaatgcaaaggtgtcaagagacaggcttctctcagggagctcaacctccgcgagaggagagaatgccttatcaagggaacaatggcaccacccaggctagggcaggacaggtgtctggggctatttcctgaccctcttgagatcaggcaattacatcttagggaacttagggaatagctgtgtgcaggccacctttgcctccagtataaatgtctctctcatagttcttgtgctcagggtggacttcatggcctcctgcctggctctcacaggccacattgacccatgggagtgactcgactctgttgtgtagtctctgggtctccagtacctgtcaaagagcctgacatacagccacctggttaatatttatcaaattattaaatgggcaatcgagacttggtatctgggattccactgggaatggggaagttccctacatacaagccagggaaggggaagttagctgagccttgacagcccagccctggcctgtgtggaacaaatagagcagcttctgaattcaggtctgaggtttgccatcgtcatcattaccttcctatcctcttaaggtatcacagtattctcatgtatgttatctcacttggccctcataacaggtgagtgactcgggtgtggtcctccctgtgatgatggctgaggtgctcaaggccaatatttgctcctggctgcatccgtcgtacctgctccatccgcagtgggatgactattcctttgtatcccacactcactcattccttctgtccccagattccatcttgagacaggatcttgctgtcacccagcctggagcgcagtggcacaatctcggcttactgcaacctctgtctcctgggctcaagcaatcctcccttctcagcctcccaagtagttgggactatacgtgcatgcccccacactaggccaatttctgtatgttttgtagagactggatccctttttgttttgagatggagtgtcgctctgacacccaggctggagtacagtggcgcgatctcagctcactgcaacctccacctgtcaggttcaagcgattctcatgcctcagcctcctgagtatctgggattacaggcacctgccaccacacccagctaacttttgtatttttagtaaagatggggtttcatcatgttggccaggttggtcttgaactcctaacctcaagtgatctgtctgccttggcctctcaaagtgctgggattacaggcatgagccactgcgcctggcccatctttcttggtgcccatctttctctattctagcagtggctctcagccaaactctgaaaatttgggaatttgggatcaatcactctagcaactcaatgccctttctgtagaagcagaaactctgggccttttatagagacatcatgacctgcaaaggagaaagctatagtttggggaatatatctcttcccaaggatttgtaattcaacctccagttagatctgtgttacttcgatgtacacatatttcgaggttcatttcctgttggtgttttgtatcccggtttgcttttcccatttccctggaatgcagagacatgtgaagcctttttccttccctccccagctcactgtgctctgtttctgctttgcagggtttggtttctaacctgactctcagttccaatatcctcacggactggacgatctttccactggacactgaggatgcagtgcgcagccacctggggggctggggacaccgtgacagtggccaccatgatgaagcctgggcccacaactcatccaactacacgctcccggccttttatatggggaacttctccattcccagtgggatcccagacttgccccaggacacctttatccagtttcctggatggaccaaggtacgtgtcttcatgggaagggtttgaattcaggcctaaacttttggttgttagtgtctgagaaagaatcacaaagagctgttagtgagatatcgtgtgatggttttgagtgtggcgtttcggacattcttcaggaggcggattgtggcagatcttcagggattcagtggccagctcggaggtgctgccatctgcccccttgtcattggcttcctgtagtgaatgacaccatcctgcctcctccaagaagaatcatgaccccttttgatgctgattataggggtgctttctctttatcttgaggacaatccagtcaagacaaagaggtggatccctctgggagagtctgtctggttttcatttatgccaagcccagtgctcccagaatatccccacctgcatccagccccacacccctggggcttctatcataagctgtctgcttctccactcttcctcatccattttcacttcccagtcactccgccttgtcgtttgaagacattggcatatcttccttcaccgccttctcctctccctcatgtcctgttttcatcctagatcaccttaccatcactcattcaacacacttctcattctgtggccactatgtgcccaaggtgtgtgccaggcactaaggatacaatcatgaataaaaccaaacatggtcctttccctcatggaactttcagtctagtgagggaggcagactcatattaaaaagtaaaaccatagctgtgatggatgctaagaagggctatggggttgataataattggtgcattttgccttgtcagggaggtcagggaagccttccctaagatagtgatgcttgtcagagatatgaaggatgagtaagaattagcatggcaagaagggaagaaagcatgttcctgggagaggtaacagcttgtgcaaaggccatggggttggaggggaaaatgtcaagtgtggaaagtaggtagagactagattgggacgggccttataggccacgttaaagttttgtctttgtgttgagagccattgaagcaggagagtgacatgataagactgtgatctgacaagctcctctgaccccattgtgcagaatggtttgggtaaggacacttatggattcgaggaaaccatctaggaggctggaccatagtctcattgagaaactgggatggtggtatctaagatggagatgacatcaactatttgagagatgttcgaagttggatcaataaattgtgacaatggattggacaggagggtttggggagagggatatgtctcggatgactcaggtctcaagcttgcagctgggcagaatggtaccatttgctgaaagaagcagcttcagaaggggacttaggcttagaaaggggggtcatgagtttgaatttagaccaattgtgtttgaaaagctgccttagtctatttgggctgctataacaaaataccataagctgggtggcttataaacaacaggcatttatttctcacagttctggaggctaggaagtcttcaatatcagggcaccagtagatttgctgtctggtgagagtctacttcatcatagacagcaccctctatgtccttacatggctgaaggggcaaaggagctctcttgggtctcttttatgaggacactaatttcattcatgagggctccaccttcatgacctaatcacctcccaaagggggccccacctcctaacccatcacatgggggctagaattttaacagatgagttttgggtggacacaaacattcagaccatagcagaggccttggagaatggctaggaaagacagtattggaggagggttgttggatctataggctgggaattcagggcagggatctgggccaggaatgtatgtagaagatcattgttgtatagatgattgttgaaaacatgggctggatgaggtctctcaaggagagaggatgcagagggaagaaaagaggacgtaaggctgatgtttgagggacaaaaacatgatgaagactgaagaggagagaccaaacaagtaggaagaaaaccagcatttatgctgccaagaggacaaataagataaagacagaagcacttcggtggttttagaagcaaggaggcccttgggaatcagtaagccttgttccagtggagtgaagcatctcccagccagattgcattctatagagaagaccagggtaaggaatacgaacaggaatacttgaatataaacgttctttttgagaaatttaattctgaagaagaggagaaaattatattaatagctggaggaggagaaggcaaaagatgtacatggtgtgtgtttaataaaatgcccttttatttatttatgtgttgcttgtttaaaatttattgaaatgtattttcattattctgtttgaaatattttcttttttttttttttttttgagatggactctgtcacctaggctggagtacagtggtgtgatctctgctcactgcaacctccgcctcccgggctcaagcaattctcctgcctcagcctccagagtagcggggactacaggcacacaccaccactcctggctaattttttttattatttttattttattttttattttttgttttttttttatttttattggagacggggtttcatcatgttggccaggctgatctcggactcctgacctcaaatgaagtctcgaaaagtgctaggatagacatctgaattcattccaacttatagttattatagttattataatactgctgtaaacacttgcatgtaagtttttatgtgaacttggcctcgaaaagtgctaggattacaagtgtgagccaccacagccatcctgttagaaatattttctactttcccatatgatttcttctttgaaccatagattattaaaaagtatgttttactgggtgtggtggctcatgcctgtaaatcccagcactttgggaggccgagacgggtggatcacctgaggccaggagttcaagaccagcctgggcaacatggcagaaccccatttctactaaaaatacaaaaattagccaggcgtggtggtgagtaactgtaatctcagctacttgggagactgaggtgggagaatctctcgaacctggaaggcagaggctgcagtgagccaagagcatgccactgcactccagcctgggtgacaaagcaagactgtgtctcaaaaacaaaacaaaaacaaacaaacaaaaaaagtatgctgtttaatttccacatattttgggtttgtaaaaatatcttgtaattattaatttgtaacttaattcctctataaaacttctaaaatttctctctagggagagaaatctccatgatcttgggttaggcaaagacttcttagatttgacacctaaggcattatccttaaagaacaaaaattgataaattggactttatcagaattaaaaatatttgttcttcaaaaagcattattaggaaaatgagaatccaagccacaaactgggagaaaaataattttcaaatcatatatctaacaaaggacttatatctagaatatgtaaagaattcttacaattcaataatagacaaacagcccagtcacaaaaggagcaaagaacttgaatagacattttaccaaagaaggcataagatggctaagtacatttgcatttgtataccttctttggtaaaatgtctattataaactaaaattagtggctgattaatgttcaacattattaatcatttgggaaatgcaagtcaaaaccaaaatgaaatactacttcacactcaccaagatggctaaatagtaagaaggacaataggcaatgttggaaaggacatgggggaaagggaatcttcccacattgctggtagaaagataagaaggtacatttgggagcatagtttggcaatttcttcaagggctaaacatagattaccatagaacccagcaattccgctcctaggtatatacacaagagaaaggaaaacatgttcacataaaaacttacatgcaagtgtttatagcagtattataataactgtaagttggaattaattcagatgtctatcacctgacaagtggagaaagcatgtatatccatacgattcctcaataaaaaggaatggagtactgataacatgccacaatccagatgaattggaaaaatattatgctaagtaaaagaagccaaaactaaaaggctatgtattgtatgactccatttatatgaaatgttcagaaaaggcaaatccatagagacagtagcttactggttgcctagggctgagggtgggaatggagcgtgactgttaagtgggcatggggtttctattggagctgatggatatgctctgaaactaacttgaatgatggctgcacagtcttcttaaatgtatttagacttgttttatggcccagcacaggcatatatcttgctgaacatacctttggaattttaggctttaatatcctctctctggctgcatgtttctatgcaccaaactctcatgcctaccaaccttgctcttaaatctttttttttatttttttgagacagtcttgctcttgtcacccaggctggagtgcaatggcacaatctcggctcactgcaacctccgcctcctgggttcaagtgatcctcctgtctcagcctctcgagtagctgggattacaggcaccccccaccacacttggctgatttttgtgtttttagtagagatggggtttcaccgtgttggccaggctggtcttgaactcctgacctcgtggtccacctgccttggcctcccaaagtgctgggattacaggcatgaaccactgcacccggccttaaatcttattaatgacctgaaacattccaccattaaggctgcagttcttcctctaccaagcctaggccttaccacaatcttttttatttatttatttatttatttatttatttatttatttatttatttatttatttattttttaagatggagtttcattcttgttgcccaggctggagtacagtggcacaatcttggctcactgcaacctccgcctcccaggttcaagcgattctcctgcctcagcctcccatgtagctgggattacaggcatgcaccaccacgcctggctaattttgtatttttagtagagacggggtttctccatgttggtcaggccagtctcaaactcccgacgtcaggtgatctgcctgcctcggcctcccagagtgctgggattacaggcgtgaaccactgcgcccggccaccacgatctttttttaagagtcatcagtccacctgcccccttgcccctttggccttctactctgcctccttcattcctcctccatgtagaatggatccactactggtgtctctgctggttcaccagtcactgagcacagctaagggacttctcagcgcattcatcgtggctaccatcccctcattgttgccagcctccagaagccctcagatttgcccagcagtccttggtctctctctgctcctttcccccactggccttttcaaccttcagcaccctccttaagccacctgactctccaccctctccactgaagacctcatcctccttgactgctatcaggtgtaactcctttgttccctcagcttcctgtcagacttatctctctgcctccaacctcatttcctgcccagtggtatctaggaggaagtctgaattctgaatctcctccccaccttcttccttcagggcaagatcctgttctcatatttcctctacctgcattttgtcagcctctccatctttctgccgagtcccatttttcagccaaaaagtggtaactaggagctctaggacctaaacacaaagaaagccctccctggatcttccccctttagctagcaagttcttgttccctcgatccctctttttctcccctcctaatgcagtagagaccaatggaaaagtgtgggatgtgttggaggtcagagggaggttcatcttggccaagtcttaaaggtgtcacacgcaagagttactgacccaggcgttctgctcaacgctttatagacactatctccgtagccatcaaaagaggcacctgtggtagatggatcattatctccagtttgcagatgagtagctggaggcttagatagctaagtaacttgtacgaggtacagaagtgctcagtggcacatctacctgagccccagccgtgtcttgaaggcccatgtgaaaaagcaggcagcattgagaaccggtgaggaactcatactcattatctaggctggggctctttacttatttggtcagtctgatgaatgctctgcatctccaggcttgaaagtacatctccacacagtatttgtgaatgtgtcaaagggttcagacccccaaaagcccatctaatccatatgtccactcaaacacttgtacacaactgttcattgcaccattatccataattgccaaaaggtggaaacagcccaaatgtccatcagctgaggaatgaataaacgaaatgtagtacatccatacaatggaatatgattcagcaataaaaagaaatgaagtattgatacatgttacaacatggaagaattttgaaaacattaggctaatgaaagacgccagtcacaaaggactgtatgttgcatgattccatttacatgaaatgtccggaacaggcaaattcatatagacaggaagatctgtgattgcctagagcagggaaaagagagtgttggttggatgggaagagaatgttaaagggtacagggcttcttaacggagtgacgaaatgttctataattgactttggtaatggttgtgcagctctgtagtatactaaagactgctgaattgtatggtatatgaattctatgtcaataaagtgccacacacaaggcccatccaagaagtttgtggactttggactgaatgcgtgtgaaggtccaagggtacacacacatcctacctaacacagaaccaatgtggtttctgttttctggtgcacagtggtccctgctgctggggacagtcccaggccagctctggggcttctaaatgatcagccacctcagaacaggcagatcccactcccacactgagtgctaagctctgacatttgaaagaatgagcacgttagcacatggtttgaatgcagggagctggcagttgcggtgtggggttggacaaaatgatccctgaagccccagctgtttctaaggctgtgcactaacccccacatccttcatcaggagaggcccttgtcaaaggccctggcacaggactctatgctcttcctattcattttactgtaaagaaactaccttgatttagagagcaaagtcactgataagggcgattcataagattaaaaaatcacttttgtttacactggctttacttgagtcggatgtggctttctggttaatgccagatgtgaatgaatatcaactgggacttcagtagaaaggggtcaggcatgttctgctctgtccagcagacacagggcaatgctttgacctcactgagttcttatctgactggaaagtccattagataggaagcgttcttctccagtgctttccacaatatgtcctgtatgccagtggtccccaaccttgttggtatcagggactagtttcgtggaagacactgtttccatggactgtgtggtcaggggtgggggggtggaaatggttttgggatgaaactgttccacctcaaatcatcaggcattagttagattctcataaggagtgcacagcctatatccctcgcgtgcgcagttcacaatagggttcctgctcctatgagaatctgatgctgctgccgatctgacaggaggtggcgctcaggcagtaatgctcgctcacctctcactgtgcggcccggttcctaacaggccgcagaccagtctgtggcctggggtttggggacccctgctatatgccaaacctgaaatgtcatgttctgccactgcagcagtgcttgtgctatttatctctctttcagctgggtgtggataagtctcctgtcaatatcctatgcagccttcaacattttgtggtaggtttaggtgcatgacagagcatggtgtgagtgggatagtgtccatttttccttaaccaaaattatgctttgaagagtcaagaatcaaaatagaatactgatgaaaagtaattctgtattttaaagataaattgtcccaccttcaagatgtaaaataactatgaaataaaacaatgtataataaacggttgaaagaaattccttcttttaactgtttgttgcatcttgcttttgaaatttcctggccgacgcgatggctcacacctgtaatcctagccctttgggagaccgaggtggtaggatcacttgagctcaggggtttgagaccagcctaggcaacttaataagacctcatctctacaaaaaaaatttttgaattagctgggcttggtggcatgcacctgtagtcccagctacttggtgggagatgggaggattgcttgagcccagcaaatcaaggctgcactgagacatgattatgccagaaaagagtatgtaaaacttttaaaaccttatcagtgttagtcacttggtctcaatccatttggagagacagaggtatagaaagagcccaagaggattataagagtctgtaagagatatgtaaaccatgcagttgggccttggagaggaagaaattataagtgcttaagattgctgggaaaggtctggtcttcctagtgggaaggatattttgtgcagagggattgatatttttcaagggaatagtatagtaagaaatatatttggtctttgtccctggttccagggccctaaaacccttggaattttctgagtggtaggagtgtcttttgttattcataactagcctctttcaatcccacctgggtttgtgctaatgaggcgacttaggatggagcccctagataactataggatagttacaagggcatgatggcacctgcagtcccagctacttggtgagaggtggggggattgcttctcctgacttgcgtgcccaaacttctcctggttttcttccctctctttgctccttctcaggcttctctgtcagcttctatgttgcagtcctcaggacttggtcctgggctctcttcttacacttttggggattgtcctcacagatgtgctggacatgcttacatttccttttccagctcagctcttacaaggctctggagcccacctttgggggtctcataggcacctccagcctgataggtataaaacagaactctctccctgttacccctgaaagctactcttctgctggagaagtggtccagagagaaggaacagagctggacttgagtgtggcagtagggagggagggcggtccagcttcaggaaatagtaatagtaccagccacatctgagagcttaccatgtgctggctacagtactgagtgctcacaggtgtcttctcacccagctgttctcagcaatcctgagaaaggcacagacatggctgaggaagccccagtgggatttggtgattgatcagtgaaagtgggactgactaagtagtggatggctctactatttttaaattgagtttttaaacgtcactcactttcctgaaaagtagcatgcttaggcaccttctgaccatggagatgtgtatcagttagcttctgctgcataacgagccacccaaaacttagtggattaaaacgacaacagtttatttagttcacgattttgagtattggcagaccaagtagtggttttgctggtctcagctgggcatgaccacctgggtgttagccatctgtcagctgaggcaacagagaagatgagaccatctctctttcatcatccagcaagctagcctaggcttgttcacatgactagcagggttcacacgactgagcagggttcaaagaaagaatgcaaatgcgcaaggctccttaaggccaaagtcaggattcacatgtcgcttcttccacgttgtttggccaaaatatgtcactagaccagccagatccaaggaatggagaaacatgttctacccctttttttttttgaaatggagtctcactctgttgcccaagctggagtgcagcgacacgatctcagctcattgcaacctccgcctcccaggttcaagcgattctcctgcctcagcctcctgagtagctgggattacaggtgcacaccaccatacctggctgatttttgtatttttagtagagatggggtttcaccatgtaggccaggctggtctggaactcctgacctcaggtgatccacccaccttggcctcccaaagtgctgggattacaggagnnnnnnnnnnnnnnnnnnnnnnnnnnnnnnnnnnnnnnnnnnnnnnnnnnnnnnnnnnnnnnnnnnnnnnnnnnnnnnnnnnnnnnnnnnnnnnnnnnnnnnnnnnnnnnnnnnnnggacccactaataattggggccatctgttcaatatcccacaggtcttaacactattggaccctactttcatcctaaatttgatgtgcttgttaaacttcttttttgtctaatttgcagttatgcttacctcctacaagacctactatttccgtctaattcactgtttccagttgcacaagtcccgtgaactttgaaactagaccatcagactactctcaacaaatattatgttaatttagcaacaaaacttgttagaacttttgtaaatgggtaaataggctagaagtgaaagaaggtcttcttcaatttttaggttgtgaactttataacaaatatgacatgaggcagtagtttttgcttatcagttcctagcttggttccagatacgtgaggtggtttgacgactgttgttaggtaagctattgtattaaaaaggtctagctatggtggaactgttggaagttgagaaggaaaaagaatttttatttgggatttgatgagaagtgatttatcttttatgctgttattttatgcatttgatggcttcagttctatttggacctgtcccaaaatatagagaaaccataaagttatttaattttattactttaagactgaggaggaagcaaaaaagtgtgatttgcgtcagctgcagagccttttggggttctgaaggaaggggagaattaatcttctgtgtatttcattgagatctatttaacctcttatttctaagcaagccttgtaagaggcttttacctttttttcttttcaattctcctctttttcttctctttctcccaggtaagcatcacagtgattcatgagttcggtgtgtgagagcctttaaccttgggaactggacctttgtctttcccgttttaagtcctgcaagtgtctaaatgttttctttcagagtgtgacaaaggcagcattcaccctgagcttattgttgcttttaaaggagctcccaaaaaattttggaaaattttaaactacaacttaaaacagtagtgagaccaggcacagaggctcacacctgtaatcccaacattttgggaggtgaaagcaggaggatcacttgaggccaggagtttgagacaagcctaggcaacatagtgagattctatgtctatttttaaaaatagtttttaagttagctggccatgatggctaacaacaacacgtgcatacctccccccgatagtttcacacctatagtcccagctcctcaagaggctgacacaggaggatcgcttaagcccaagaattcgaggctgcaatggactgtgatagtgcagctgcagtctagtctgaatgacagcgtgagaccctgcctcataaggaaggaaggaaggatggaaggaaggaaggaagggagggagggagggagggagggaggnnnnnnnnnnnnnnnnnnnnnnnnnnnnnnnnnnnnnnnnnnnnnnnnnnnnnnnnnnnnnnnnnnnnnnnnnnnnnnnnnnnnnnnnnnnnnnnnnnnnnnnnnnnnnnnnnnnnnnnnnnnnnnnnnnnnnnnnnnnnnnnnnnnnnnnnnnnnnnnnnnnnnnnnnnnnnnnnnnnnnnnnnnnnnnnnnnnnnnnnnnnnnnncagagaaagtcactttgtcatggaactattttaactgagactgccttaggaagccccagaaaccactgcttggtccccatggggctgacttcattaagagtgtatctacttttagatcatattcagcaacacgtgcatacctccccaccaaaaataattgcaaaagcataactttttaagagaaataaaaatcaatgtatatattttttaaatagaatttttaaaggtaaattatattaaagtgtttttcattggttctaatcaaggagggaaggcaaatgtttttcttttagtgaacaatattctttaaaactcttaaactgggagcagaggaacgtgaagaattctttcagaagggcttcatgtcacctcttcaacgaatcttttcttggcagaattatcaacaagtagcagcagccatgagtgctactaagtgtatattgaatatcactctcctgcgtgcggagaatctcgcctcaaacaaaatggacaaagactttcccttcctagagcctgtgttatagctggaaatagctcataaactagtcatcaaacaaaagatatgaatttcaaatcatgataataactagaagaaaaagaaaaaatgaaaggatagtgagtgacttggaatggaaagcccagcattaaggaggagggtcgtggccctgcctgagtgatgagaaggcttcaggctgaggtgagtagtgtttgcacatggggacgagctgatgcccaagcaaaactaactgaaagtaattggggagctgtgtgtggtgatgcacatctgaagatccagcttctcgggaagctgaggcaggaggatcgcttgagggcaggagtttgaggctgtattgtgcctgtgaatagcaactggagtccaaccttggcaatgtagcaagatgtaagagtgagagagagagagagaagagagaagacaggaaggaggagaagagaagaaggagaaggagaagaggagaggagaagagaagagagaaaggaagaacaagaaggagaagaaagagaaggaaagaacaaaaagtagtggagagtggagtgagcaagggggagtgcggcagacacaaggaggaaaggaggaaggtatgggctgtggaccacaggaaggaggtttgaaacaggaatgtgtgaaaagaatcctattttcactttggcagctatgcagagcctagattctagagttaataaagtcaagagactgtgaggaggctgcagcagtctaagacaacattgatttatgacttgctctggaagtcaggctgtgaggatagagagaaatggaagactgatggtctaataatgaagtcactaggatctcaccataccttagctctgtagtccagtgcagtagcttcttgtataatattgttgggttttttctgtttgttttgttgttgttttttttaactgagtcttgctctatcacccaggctggagtgcagtggtgcaatctcagctcactgcaacctccaccttccaggttcaagcgattcccctgcctcagcctcctgagtagctgggattacaggcacccaccaccatgcctggctaatttttgtatttttagtagagacagggtttcaccatattgaccaggctggtctcgaactcctgaccccaagtgatttgcccgccttggcttcccaaagtactgggattgcaggcatgagccaccacacctggccttgtataatattctttacaagaacgttcatttttaaccacatatggttaagtttaaattaattaaatgtgaaaattcaattcctccttcacacttttttaaaaaatagctactctttatagtatcactaaagttggacacatgcatatcccatgacccagcaattccattcctagcattcccctcctgtaagaaacatgtgcatggccaggcgaggtggctcatgcctgtaatcccagcactttttgggaggctgatgggggaggatcacttgagaccaggagtttgagaccagcctgggcaacatggcgaaacctcatctctaaaaaagtacaaaaattagccaggcatggtggggcatgcccgtagtcccagctatgtgggaggctaaggtgggaggttgacactacagtgagtcgtgatggtgccactgcattctagcctgggtgtctggagtgagatcttgcctcaaaaaggaaaaaagaaaaagaaaaaggccaggcatggtggctcacgcctgtaatcccaacactttgggaggccgaggtgggcggatctcttgaggccaggagttggagaccagcctgggcaacatggcaaaaccccatctctaccaaaaatacaaaaatgagctgggcatggtggtgcacgcctgtattcccagctactcagaaggcggaggaacaagaagctcttgaacttgggaggtggaggcggaggctgcagcgagccaggattgcaccactgcacgataacctccccagagcaatggctgctgcttctctccaccctcccaatctcaagcaagggcctcttctgaccaacgctaacccagaaccatccagggaaggggatccagggaaaacaattcccagcttacctaccaggtgcacagtccacccggcatgtgagggcccatctcttggatgcttatgaaatggaacttgaggtttgagaaaggaccaaacctccactttgttcacctgcgatttggtcaagagttggcttggcctgtgtcctgaccatagcatgaagcctgtgtggtgcgtgccattccttggctgctgctcgtaatgccctcccacttctctgtcttcccccttgaccgcaaaagtaaagtgctactgttctctaatactgcaaaaacaaggcaccggcagattttaagctgataaaaacctgctaaagctgtcattgtatataccttttaggatggaatgagataacatatcccagggtaaaaacaagagtgaaatagttctgagaactgtgaaactgtcgtcctctttctaaatgacttaatccaacagacaggtggtttttaatcacggacccccttcttttgtaggcattggaacaccaacatcttttcactttaatcatgtaaggagtgctaccgcttacaggccacacactgttccttcatcatcattgtccccaatgactggtatgaaaaattgagttgagacctgcccaaggtcagacagctagtaagtggcaggacacagatacgaactcaggtaggaaattcagaaggatctaaagtaaaggggacacttggaggctgaaaaatacccaaacgtaagaagactgaggagccctggggtgagcagcagagttgtgttgcagaacgtgatgaggattagggctcagcaggtgtcagccatggctgggcctcctccaggctgtctcctaggatatctgggccattgtaggtcacagtttctttcctgcctccctcccttcttccattcctctttcctcttccttctccctttatgttttcctttcttctcccagattttctctttcttttgcgtgtatgtgatctccccatcttcactttctttctttgtaatagaatggtccatctattcagccagctgttgatcctagcctttgagctttgagcaaatcttttttttttttttttgagacggagtcttgctctgtcactgcgcaaggctagagtgcagtggcgcaatctcagctcactgcaacctctgcctccctgggttcaagtgattctcttgcctcagcctcctgagtaactgggattacaggcatgtgccaccacacctggctaatttttgtatttttagtagagacggggtttcaccatgttggccaggctggtctcgaactcctgacctcaggtgatctgcctgccttggcctcccaaagttctgggattacaggcatgagccactgcactcagcccctttgagcaaattttagcacatacagagaggctgtgtagacagacctaaacatggtccctgttttttaggagtttatcctccactttcagttttgttatgggaagcagcttcccctactcacagaaattgtttatgcaacctatagcatcacctctgctcctgaaccaaacatggagtccacaccctaactctgagggtgcctgtaagagtccttagaacatagcagtaatatagacacccaactggataagcctcttcctctccctcaccccaaacccccctatccctcttgaggggttgttttggggaccactcctggtacctgtctgacctcaggatgcaggccctggagtcctctgttccctgtgttcaccaggtgtacagcagatagtgaggtcaagacctgcctctgggaaaggagaacaaagaaggaaaagatctatttaaggaagcagttcagcagttgtcttctgtgtacagaaaagtcagggagaggctggtctgtgggtacaggcagcacctgggaaccaggatgaaattcagaaatttccacactgttctctggtaccaacatctgtggccactgaagcccgtcagagggaccaaacctgtattttcctgaagcaggagtgggtctttggggcaagtttttgttgccccaaagaaggtggatgggggcatccaccttcttcccaccttggccagttatcccagcaagaagctaaaaccaaggctggcatgggcctggctgtcagcctcgcctttctgggggcatttctttcctccattgctgctggcctgccctacatcagggcccccaccttcctcagggctttcggtgcatctggggttgatggttctctgtctctctctctccagggccaggtctggattaatggctttaaccttggccgctattggccagcccggggccctcagttgaccttgtttgtgccccagcacatcctgatgacctcggccccaaacaccatcaccgtgctggaactggagtgggcaccctgcagcagtgatgatccagaactatgtgctgtgacgttcgtggacaggccagttattggctcatctgtgacctacgatcatccctccaaacctgttgaaaaaagactcatgcccccacccccgcaaaaaaacaaagattcatggctggaccatgtatgatgatgaaagcctgtgtctttgagggattctaccctgaacatacctcacagatcctccctgtcatgccacatttcactgattggaatgtggaaatggaaaaggaatttaggatgtgcattttcacctgaggtttccctgcatccctgcagtgccaaagccccaccttcagggaccacctggaatgtgtgaggggctgacagcacagtaacgtgcatacatatctgcagggctggaatggaagctttaaaggtggtagtgatttttattttggaagaatcatgttacctttttgttaaataaaatttgtactcaaatgatgatgtcactgtttttaatgtgcaggtattgaattacatggtctgacttaaatcataactagacttgagtgggctgaataaaccacttcactaacttgaagttcaaaaggatggaaaatagtcttggtttgatctgtggactgctgcttttctgatcgttatttgacttgcttttggactagataacctataaatacagctcaaaacaattatgcaaacaatctaaatgattaacagttgcacagtgtacatagtatggtatatctatatagaagcatagtattttagccactaaaatggtgagagatctatacttatatgcaaattttttgatacatgaaaaaacagattaccttaaattggatcccgttttgtgtgtttcaacataagaacttcacatattcacacagtacaggcctatacacatgtcagtagtcaggcatgcacgtgtgtgtgtgctgtgtatgtgcacagataggaaaggatgtggtgtttctgatattcctgtcctgacatggagcagtagctctcatttgttgaggacttgttctacaccatgcacagttctgagtttatgtttaactcacttgcccctcacaagaacactgaggaatatactgtcatcctgccggtttaccagatctcacagatgtatgtggcgagacagggtttgagcccaggtagtctggctctagtgtccgggtacacattgcatacataaatattaatacatgcttgtgttgcacaagaaaggttaggaataacttaaaaatgttcatatacttatatctggatgctaagtatttgagagattgcttgctttttcttatctgtatttttaattatatactgggaatatgtaatttttttttttttttttgaggctgggtcttgctctgttgcccaggctgaagtgcaatggcatgattgtagctcattgcagccttgaattcctggcttcaagtgatcttcctaccttgacctcccaaagttctgggattacagttatgaaccactgcacccggccctgtagttttgttttgtttttaaggagggagaaaggaaagtttttttatgtcaatctgtaatgttttcttggtggtatatttttccctctgtcataggcacaactaataaatatctgagattgaacagtgagtctttaaacacaggttgagccagctgcaagtggcatagatgagccgaaacaaacactggaacttagttaaggacgtttttccatagtacctttttctagatgttctgcaccatttgatgtttgggcagatcacagggcgaaggaggtgctacatggactcataccctcatttcattactcctccactgcacagttaccaaaaacataaaatgatactcaagaaccatggccaaacagtgataagctttggaaagaaatgtgaaatgactccttttaaagcatatgtacattggtgaattgcagttcccctgccctagagacaagcagagaatctccagaaggcacgagcagtggagtgtggttgcctcatcagcgtgtacacttgccttatatttcactcattcagtcttcagaactacactgtaaggtcaaatagcaataagtccattttacaattgaaaatatttaaaactttggcaagaggcagagttgatttcaaacctggcctacctccctccaaagccagagtgttttgtcttatcaatgtgagggaatttggatgggttttcccacctacagcactctgccaccccttacccaggaagtttttggaaaacagaatcttttttttttgaaacagagtcttgctctgtcacccaggctggagtgcagtggcatgatcttggctcactgcaaactttgcctcctgggttcaagcgattctcctgcctcagcctccagagtagctgggattacaggcgtgcatcaccatgcccagctaatttttgtatttttagcagagacggggttttgccgtgttggtcaggctggtctcaaactcctgacctcaggttatccacccacctgggcctcccaaatcgccgggattacaggcatgagccactgcgcccggccagaaaacagaatcttaatacatagatagtgccacctggactctggactcccctcaacccatccaactctacactgcctctcatgggcacacattttgcctgctacaatgttcttcctaaaataagatgtgccttcagtcattcttgatttctctcaataaccttatttcagatctgtccacgaattgattgaaaatgcaactctctctatggatgctacctttggaaaataataaggggagtacttttattacctactatctaaaccttttatattaaatttatctttcagccaccgtgcccggcctcacaatgtagtcatttgtgtctgatctctctcagcataccgtgaggtttgttccatgttgtagcatgttcaggaatgtgttcctgtgtgttgctgagtcgcattccattgtatggatgtaccacattttgtttatccatttgccagctgatgggtacttgaatggtttccagttttgactattatgaagaatgctgatatgaacatccatatacagttatttgtgtagtcatccgttttcatttctcttggatagatacccatgagagggattgtttagtcgtatagtaatttatattgaactgtttaaggaactgttaaacaatttcagaatatcttttttgaagatagtgaataatgaagaggaggcagaattacccttagacctgtaatcccagcactttgggaggccgaggtgggtggatggcttgagcccaggaattcgagactaggctgggcaatatggcaagacctcatctctactaaaaatacaaaaattaggccaggtgcggtgactcacacctgcaatccaagcactttgggctgaggcaggtggatcacctgaggtcaggagttcgagaccagcctggccaacatggtgaaaccccatctctactaaaaaatacaaaaattagccgggcatggtggcaggcacctgtaatcccagctactcaggaggctgaggcagaggaattgcctgaaagcgggaggcggaggctgcagtgagccgagattgcgccactgtactccagcccgggtgacaagagtgagacaccgtctcaaaaaaaaaaaaaaaaaaaaaaaaaaaaattagctggatgtggtggtgcatgcctgtagtcctagctactcaagaggctgaggtaggaggatcacttgagcctgggaggcagaggttgcagtgagctgagatcacaccactgcactctagcctgggtggcagggccagaccctgtctcaaaaaagaaagaatcacacttagaatttgcagatttatcatccctcctgtcctctctcttcccttctccaccttacactacctactttctttatctgtcattgtcagtctgtttatctttgtttctcagcaaatccagtttattcagaatgaaattgtttaatgctaatccgaggtggggttttttttcattgtttccccaacaagaaatatgtcttctgtcaaatgacacaaataggaaatgatctcatgtggtctttatttctctcctttatgaaaaagaagtcattttctgaaatcacctttttagtcagtctgagggatcctgactggtctgtggtagcacacacagctggtgtggaccatcagcacatgggctgcaaggaaaatcgccccgatgtccagacagtggggccaggtggtttctgggttttggcctagcccctgctcttggtctgactgagcaatacttccccagatgtcccttgcccttcagcccactggccctgacctttgttagaagtggatgcccagcagctttctggttgtctgtgaatgcccggtgaagattctgaactgattcctcaccagacagttgctctgtttgcaccacaaggggctttcccacgtgtgagcaggcctcccaccagcttcattcctccaaactcccaaaccagcagcactgtctcctaagatacaacaggacaggctttgaggacagaaacccagggtcacgttcctgctccatcactttccatcagcatggtctcgggcaagggaatcgtgtaagtctaaatttcttattctcctaaatgtggtggccaccttgtggggttttaaaattaaatgaggtcatcataaaagtaccttgtatagcatttgccatgtagtagctgcttactaaatgctagtttgagtctttcctatcatattccaccacagaagcaggtaactgatcatctggaaacctgggggacaagagggaagaaatgacacctaggatgctccatcctttccctgcatccctttgtgttcagttcaacaacttggttctcctcctgaccagccactgtgcttggctgaggacacaaaggtgaaggagacagtctagtataaaacatgacacagaccagacccaaaggggaggaagaggtcctgtagaaaggtgaaggggcatcattcaccaagcctctccagcattaaccagagactgctggagggcagcgtgagcctacggaaaagactcgacatccagggtttggacttaaaggccctagtgtggacttcttcagtgctctgattccttgaagattctgttggcttgttctcaaaacgtaagcaactttccagtgccaacatattgaattccttgcccacggggcatttctcatcatcatgggttgcaatgtgtgctgttgtctgttgctgcataataaaccagtaagtctgcttaagtggcatgaagcaactattttgttatgcacacgattctatggatcaggaatttggacagcccagcaaggatggcttgtctttgttctgtgacgttggggcttctgctgggtaccagaaccatctggcaattccttcactcacttgcctgctatttgggccaggatgacttgaagtttaaggccacttaggacagtcaacagagcatctacaagtggtctttccatgtgactcaggcttcttataacacagtagctgggttctgatggcatgttccagaagggagcttccagagagtgaacattgcaacagaagcaggtggaagctgcatggccatttaaggcctagatgcagaagtcacatagcatcagtccactgtactctactggtcaaagtagtcataacccagattcaaggggaggaaacacagatccccatccttggatgggagaaatgacaaagaatgtgtggccatttttaagaaatcatcacatgtgcacccagtgctatgttgtagcacactccaatttgtgtatttccatccatttcactaaaggtctgaaagcccagcaagcatgaattgaggtccaaggccccactggtaaggagcaggaggccattggctaagtggttcatttagcctgtgtttagtgaattggatccctttgtctctttttgcaaattgccaggccccggtggtctcaccagatattaactgaggggaattaactggacacaggcaggaaatccactgtgtgaaccccccaccagtcagagtttatggaggtatgagatgatgggcactgcacacaaagctcaatgtggtttctgtttctttgggtgaaatcttttgatacgatttctgatcaagaggtgcagtctgtccaatttacttcaactttctttaatttttactaagcaatacgattattattattattattatttttagacagagtctcactctgtcgcccaggctggagtgcagtggcgtgatctctgctcactgcaagctccacctcccgggttcacgccattctcctgcctcagcctcccgagtagctgggactacaggcacccgccaccacgcccagctaattttttgtattttttagtagagacggggtttcaccgtgttagccaggatggtctcgatctcctgacctcgtgatctgcccgcctcggccttccaaagtgctgggattacaggcgtgagccaccgcgcccgactgcaataggatctttttaccagagtgctttggctgtcgtggaccacctgacctcttttctggggactttgaaatcaggaagtgtcccaagaagtgcccagtgaggagtccccaaggtttcagggtgtatcccttctagtgtgatggataagcccctcagcatttaactattttagtaggtgggtttgttttgttttgtttttttcatttacccaatagacattcattcaatacttactctaaaccccatgccactgtgtaggacacatttcttgcccctcagggagcgcacagatctattaatgaaccatgtagcttgtgaggggtagacaatgacagcgatgagatcagagtgctgtgagcatgctgaatccagtcttagacttgatgtggagcagagactggtcagggcaggcttcctggagttgagccaggtgaagaataagagaagaaggagaaaagataggcatgagtagagcagaaagtgcttctcagagggaggcagcatctgcagagatccagggtctggagagacaatggagaattccagaaattggtggcatgtacctcaatctgactggggttggaatgaacagagatgaggcaggagagatgcagggatcagagctatctccaaccagatggtagtatcctgaaaaattggttattttcacatatcttttgtcctctgaagtttctaggttcatgtcttcaactttgatggtgcttaataagaataataacattcataaagtggttttaatgtgttatttttgcatacagtatttcattcagtctttataagaaccttttgaagaaatagggcgggtggcatgcagctcagtttacagtttaggaaaatcaagaggtaggaagaattgtgatttacacaaaatcaggggcctgaaactcacacccaagtctcttgcctccaaatcccacactcttcttactatgcagattgccttgattgagctgcaaggagaaagttttgtattgtatttgagaaaactcacaacacagaagaacaatatttcagccttgtctgacatgacagatcaggtctgagctgtggccccaggttttggtgattgacccatgagtcttgtgtgtgtctctggtgagcagaatgcccggtatatgtgggtccccagtggatacaggtcagggagcaagcaatcctccacactggaagatgacttattcacaaggctgggcatccctctcagacaaaacccactatcatatctcttctggtttaattcatgttttgacactcagcaaattccccaggaacttagctgaagagtttcgtgagccggaagtgcctctgaaagaagtgagcagagagaaggtacgtggaactttattcatagttgagcaggcaaatgatgactctcggtttttctctggaggggagctcttccttgaggtgaaacgggctgaggagacatgagagagggcagagaagcaccacagactgacatcaacctgaggccttctgatgctaagaacatcacaacttccctggtgggcaactgggttcatctgtccactgtctgccatgatcggcagatatcaagaagccatttgcaaagtccaaaggacaaatatggtaaaatactcaagaaactctctgaagagtttatttgtagtggaccagaggtcactgtgctgctgccagcaccccacccccaccccagtgatcttgataagtctttcatggttttgtaccctaaaattgtgattacctggaaccaaaccttaccatgccaagggcttccactagatgggatttttgcagtactaaatatctacaagaaaaaaagagcttgtagaaaaaaaaaacaggaaaaaacagttgttaggtggaggactagttttatctagctttctattaaaagcttctgtgattgcctgataggctgataacaggaagatattgttgaaatacatattccagatcctgtcctgaagtcactgcagattcatctcagttcactgcaaactctacaaaagccaacctggtaaaagatggaattctgattgttcaggaaacagaagtggaggacagagtaaaaagactgagattaactgtctggttttctttccactctgggcaccagaattttgcctcttaatagctaggaaggagccacccatctcaagaattcagatagagcaatgcttttgaaagcaaccaactcttcactctgatataaaacgtcagtgcccatgttatctgaatagtaacatatgtagaatgtgaataccatacagcaggtgtgaactgaactttcagtccctcctcactgagcaggacacttcaacaacacgttggtcccaactcttcctctttctcttagtgaccaattttgccattttctgctcccatgttttttatacactgaaatttccccttcttcatttcagtgagcctatcacttaagtccttggtctttgcaccttaaaagtctctaagatccttttttttttttttttttttttgagatggagtcttgctctgtcacccaggctgtagtgcaatgacgtaatcttggctcactgcaacctctgcctcctgggttcaagcaattctcctgccttagcctctcaagtagctgggacacaggcatgcaccaccacacccagctaattgtgttgtattttttagtacagatggggtttcaccatgttagtcaggtggtctcaaactcctgacctcaaatgattcacctgcctcagcctcccaaaatcctgggattacaggcatgagccaccgtacccagcctctaagatccattctttatggaaatgttattaagctccaatattctctgcaaaaatgcttgtagcctgcatctctttgttaaatccaggacaactttcactcattcattcattcaactattaaggtgtacctaatacatgctgggcattgagaataaaatgataaccactttatcaccccatctctcagtctctttttaaaagagtattgagatactatcaatagcaataataataaaaacatgacctatgccttcaaaaggtttagttagtagaagagataagtaaatagacagttcaatgcagtctcatgggcaccatagtgagagacagtacagagtggcagagcagcagaagaggggttcacaatccaggcctgggcagccaggcattctgtcttactgcagagccaaagacagggctttgtgtgcacgtggtttacagaggggatgctctaaggagaaaggaagtgagggaagggtgcagggcaagagagtaaaggtaagcaaggagactactttcagcttaaaccaactgtttagttcatgattctgctatatggttcttctggtctggaacaggctccactgatgttggcttggctccctcatgtatctagcctaggtcagatcaggctgctagttccagagaaactcacacacattaatttcaccacaaaattggatgcaccttgagtcaagagggccagtcttttaaccttccatccgtgtcagccagccattggccgcaggctgccactggtgggaggggaggactagttgtactgtggggaggtagtagggaattggccataaaaaaagagaagagggcatctgtgagctgttagcagccaacgctcatggtagctggggactgggtacaccagtccataaaggaaagttgggtgggcatcatcagcatctgctgtcggtctctaaactgagacttgagtgatgagcaatagttggtcaggtgaacagtaggggaagagtattccaggttaaagaaatagtctattgcagcagtggctcatggctgtaatcccagcagtttgggaggcgaaggcgagtggatcatctgaggtcaggaattcatgaccagcctgaccaacatggtgaaaccctgtctctactaaaaacacgaaaattagctgggtgtggtggcacacacctgtaatcccagctacttgggaggctgaggcaggagtgtcacgtgaacccgggaggcagaggttgcagtgagccgagatcatgccactgtactccagcctgggagacagagcgagactccatctcaaaaaaaaaa

SEQ ID NO: 1160 - DNA, 2609 bp, Homo sapiens
acagcggggcggggcgcggggctgagcaggcgcgagggctggctgctgggccgacgaggggcggtgccaggccgtgggtccttagtcaagtgacgcgaagcggccggcctgggcgccgactgcagagccgggaggctggtggtcatgccggggttcctggttcgcatcctccctctgctgctggttctgctgcttctgggccctacgcgcggcttgcgcaatgccacccagaggatgtttgaaattgactatagccgggactccttcctcaaggatggccagccatttcgctacatctcaggaagcattcactactcccgtgtgccccgcttctactggaaggaccggctgctgaagatgaagatggctgggctgaacgccatccagacgtatgtgccctggaactttcatgagccctggccaggacagtaccagttttctgaggaccatgatgtggaatattttcttcggctggctcatgagctgggactgctggttatcctgaggcccgggccctacatctgtgcagagtgggaaatgggaggattacctgcttggctgctagagaaagagtctattcttctccgctcctccgacccagattacctggcagctgtggacaagtggttgggagtccttctgcccaagatgaagcctctcctctatcagaatggagggccagttataacagtgcaggttgaaaatgaatatggcagctactttgcctgtgattttgactacctgcgcttcctgcagaagcgctttcgccaccatctgggggatgatgtggttctgtttaccactgatggagcacataaaacattcctgaaatgtggggccctgcagggcctctacaccacggtggactttggaacaggcagcaacatcacagatgctttcctaagccagaggaagtgtgagcccaaaggacccttgatcaattctgaattctatactggctggctagatcactggggccaacctcactccacaatcaagaccgaagcagtggcttcctccctctatgatatacttgcccgtggggcgagtgtgaacttgtacatgtttataggtgggaccaattttgcctattggaatggggccaactcaccctatgcagcacagcccaccagctacgactatgatgccccactgagtgaggctggggacctcactgagaagtattttgctctgcgaaacatcatccagaagtttgaaaaagtaccagaaggtcctatccctccatctacaccaaagtttgcatatggaaaggtcactttggaaaagttaaagacagtgggagcagctctggacattctgtgtccctctgggcccatcaaaagcctttatcccttgacatttatccaggtgaaacagcattatgggtttgtgctgtaccggacaacacttcctcaagattgcagcaacccagcacctctctcttcacccctcaatggagtccacgatcgagcatatgttgctgtggatgggatcccccagggagtccttgagcgaaacaatgtgatcactctgaacataacagggaaagctggagccactctggaccttctggtagagaacatgggacgtgtgaactatggtgcatatatcaacgattttaagggtttggtttctaacctgactctcagttccaatatcctcacggactggacgatctttccactggacactgaggatgcagtgcgcagccacctggggggctggggacaccgtgacagtggccaccatgatgaagcctgggcccacaactcatccaactacacgctcccggccttttatatggggaacttctccattcccagtgggatcccagacttgccccaggacacctttatccagtttcctggatggaccaagggccaggtctggattaatggctttaaccttggccgctattggccagcccggggccctcagttgaccttgtttgtgccccagcacatcctgatgacctcggccccaaacaccatcaccgtgctggaactggagtgggcaccctgcagcagtgatgatccagaactatgtgctgtgacgttcgtggacaggccagttattggctcatctgtgacctacgatcatccctccaaacctgttgaaaaaagactcatgcccccacccccgcaaaaaaacaaagattcatggctggaccatgtatgatgatgaaagcctgtgtctttgagggattctaccctgaacatacctcacagatcctccctgtcatgccacatttcactgattggaatgtggaaatggaaaaggaatttaggatgtgcattttcacctgaggtttccctgcatccctgcagtgccaaagccccaccttcagggaccacctggaatgtgtgaggggctgacagcacagtaacgtgcatacatatctgcagggctggaatggaagctttaaaggtggtagtgatttttattttggaagaatcatgttacctttttgttaaataaaatttgtactcaaatgatgatgtcactgtttttaatgtgcaggtattgaattacatggtctgacttaaatcataactagacttgagtgggctgaataaaccacttcactaacttgaagttcaaaaggatgg

SEQ ID NO: 1161 - protein, 669 aa, Homo sapiens
MPGFLVRILPLLLVLLLLGPTRGLRNATQRMFEIDYSRDSFLKDGQPFRYISGSIHYSRVPRFYWKDRLLKMKMAQAIQTYVPWNFHEPWPGQYQFSEDHDVEYFLRLAHELGLLVILRPGPYICAEWEMGGLPAWLLEKESILLRSSDPDYLAAVDKWLGVLLPKMKPLLYQNGGPVITVQVENEYGSYFACDFDYLRFLQKRFRHHLGDDVVLFTTDGAHKTFLKCGALQGTTVDFGTGSNITDAFLSQRKCEPKGPLINSEFYTGWLDHWGQPHSTIKTEAVASSLYDILRASVNLYMFIGGTNFAYWNGANSPYAAQPTSYDYDAPLSEAGDLTEKYFALRNIIQKFEKVPEGPIPPSTPKFAYGKVTLEKLKTVGAALDILCPSGPIKSLYPLTFIQVKQHYGFVLYRTTLPQDCSNPAPLSSPLNGVHDRAYVAVDGIPQGVLERNNVITLNITGKAGATLDLLVENMGRVNYGAYINDFKGLVSNLTLSSNILTDWTIFPLDTEDAVRSHLGGWGHRDSGHHDEAWAHNSSNYTLPAFYMGNFSIPSGIPDLPQDTFIQFPGWTKGQVWINGFNLGRYWPRPQLTLFVPQHILMTSAPNTITVLELEWAPCSSDDPELCAVTFVDRPVIGSSVTYDHPSKPVEKRLMPPPPQKNKDSWLDHV

SEQ ID NO: 1162 - DNA, 1644 bp, Homo sapiens
acagcggggcggggcgcggggctgagcaggcgcgagggctggctgctgggccgacgaggggcggtgccaggccgtgggtccttagtcaagtgacgcgaagcggccggcctgggcgccgactgcagagccgggaggctggtggtcatgccggggttcctggttcgcatcctccctctgctgctggttctgctgcttctgggccctacgcgcggcttgcgcaatgccacccagaggatgtttgaaattgactatagccgggactccttcctcaaggatggccagccatttcgctacatctcaggaagcattcactactcccgtgtgccccgcttctactggaaggaccggctgctgaagatgaagatggctgggctgaacgccatccagacgtatgtgccctggaactttcatgagccctggccaggacagtaccagttttctgaggaccatgatgtggaatattttcttcggctggctcatgagctgggactgctggttatcctgaggcccgggccctacatctgtgcagagtgggaaatgggaggattacctgcttggctgctagagaaagagtctattcttctccgctcctccgacccagattacctggcagctgtggacaagtggttgggagtccttctgcccaagatgaagcctctcctctatcagaatggagggccagttataacagtgcaggttgaaaatgaatatggcagctactttgcctgtgattttgactacctgcgcttcctgcagaagcgctttcgccaccatctgggggatgatgtggttctgtttaccactgatggagcacataaaacattcctgaaatgtggggccctgcagggcctctacaccacggtggactttggaacaggcagcaacatcacagatgctttcctaagccagaggaagtgtgagcccaaaggacccttgatcaattctgaattctatactggctggctagatcactggggccaacctcactccacaatcaagaccgaagcagtggcttcctccctctatgatatacttgcccgtggggcgagtgtgaacttgtacatgtttataggtgggaccaattttgcctattggaatggggccaactcaccctatgcagcacagcccaccagctacgactatgatgccccactgagtgaggctggggacctcactgagaagtattttgctctgcgaaacatcatccagaagtttgaaaaagtaccagaaggtcctatccctccatctacaccaaagtttgcatatggaaaggtcactttggaaaagttaaagacagtgggagcagctctggacattctgtgtccctctgggcccatcaaaagcctttatcccttgacatttatccaggtgaaacagcattatgggtttgtgctgtaccggacaacacttcctcaagattgcagcaacccagcacctctctcttcacccctcaatggagtccacgatcgagcatatgttgctgtggatgggatcccccagggagtccttgagcgaaacaatgtgatcactctgaacataacagggaaagctggagccactctggaccttctggtagagaacatgggacgtgtgaactatggtgcatatatcaacgattttaaggtaggacaaaccacactgtca

SEQ ID NO: 1163 - protein, 494 aa, Homo sapiens
MPGFLVRILPLLLVLLLLGPTRGLRNATQRMFEIDYSRDSFLKDGQPFRYISGSIHYSRVPRFYWKDRLLKMKMAQAIQTYVPWNFHEPWPGQYQFSEDHDVEYFLRLAHELGLLVILRPGPYICAEWEMGGLPAWLLEKESILLRSSDPDYLAAVDKWLGVLLPKMKPLLYQNGGPVITVQVENEYGSYFACDFDYLRFLQKRFRHHLGDDVVLFTTDGAHKTFLKCGALQGTTVDFGTGSNITDAFLSQRKCEPKGPLINSEFYTGWLDHWGQPHSTIKTEAVASSLYDILRASVNLYMFIGGTNFAYWNGANSPYAAQPTSYDYDAPLSEAGDLTEKYFALRNIIQKFEKVPEGPIPPSTPKFAYGKVTLEKLKTVGAALDILCPSGPIKSLYPLTFIQVKQHYGFVLYRTTLPQDCSNPAPLSSPLNGVHDRAYVAVDGIPQGVLERNNVITLNITGKAGATLDLLVENMGRVNYGAYINDFKVGQTTLS

SEQ ID NO: 1164 - DNA, 1251 bp, Homo sapiens
acagcggggcggggcgcggggctgagcaggcgcgagggctggctgctgggccgacgaggggcggtgccaggccgtgggtccttagtcaagtgacgcgaagcggccggcctgggcgccgactgcagagccgggaggctggtggtcatgccggggttcctggttcgcatcctccctctgctgctggttctgctgcttctgggccctacgcgcggcttgcgcaatgccacccagaggatgtttgaaattgactatagccgggactccttcctcaaggatggccagccatttcgctacatctcaggaagcattcactactcccgtgtgccccgcttctactggaaggaccggctgctgaagatgaagatggctgggctgaacgccatccagacattacctggcagctgtggacaagtggttgggagtccttctgcccaagatgaagcctctcctctatcagaatggagggccagttataacagtgcaggcagcaacatcacagatgctttcctaagccagaggaagtgtgagcccaaaggacccttgatcaattctgaattctatactggctggctagatcactggggccaacctcactccacaatcaagaccgaagcagtggcttcctccctctatgatatacttgcccgtggggcgagtgtgaacttgtacatgtttataggtgggaccaattttgcctattggaatggggccaactcaccctatgcagcacagcccaccagctacgactatgatgccccactgagtgaggctggggacctcactgagaagtattttgctctgcgaaacatcatccagaagtttgaaaaagtaccagaaggtcctatccctccatctacaccaaagtttgcatatggaaaggtcactttggaaaagttaaagacagtgggagcagctctggacattctgtgtccctctgggcccatcaaaagcctttatcccttgacatttatccaggtgaaacagcattatgggtttgtgctgtaccggacaacacttcctcaagattgcagcaacccagcacctctctcttcacccctcaatggagtccacgatcgagcatatgttgctgtggatgggatcccccagggagtccttgagcgaaacaatgtgatcactctgaacataacagggaaagctggagccactctggaccttctggtagagaacatgggacgtgtgaactatggtgcatatatcaacgattttaaggtaggacaaaccacactgtca

SEQ ID NO: 1165 - protein, 363 aa, Homo sapiens
MPGFLVRILPLLLVLLLLGPTRGLRNATQRMFEIDYSRDSFLKDGQPFRYISGSIHYSRVPRFYWKDRLLKMKMAQAIQTLPGSCGQVVGSPSAQDEDLSEWRASYNSAGSNITDAFLSQRKCEPKGPLINSEFYTGWLDHWGQPHSTIKTEAVASSLYDILRASVNLYMFIGGTNFAYWNGANSPYAAQPTSYDYDAPLSEAGDLTEKYFALRNIIQKFEKVPEGPIPPSTPKFAYGKVTLEKLKTVGAALDILCPSGPIKSLYPLTFIQVKQHYGFVLYRTTLPQDCSNPAPLSSPLNGVHDRAYVAVDGIPQGVLERNNVITLNITGKAGATLDLLVENMGRVNYGAYINDFKVGQTTLS

SEQ ID NO: 1166 - DNA, 89449 bp, Mus musculus
  misc_feature (1)...(89449): n = A,T,C or G
gtgttttccttaaaaaaaaaaaaaaaaaaaaaaaaaaaaataataataataataataataataataacaaaagggggacatatgtgatagtcccgcccccatcccgctgctaatcttttgcctcaaatggtaatttcatgtctgtctgcagcccgcagcagttctctcacaacaccaatgcgttagggagttaagtatgtattactgtgttcgcttgggaaaacagagctattctgggtgttacagaaataaaggctttaatacaggaatgactacttacatgaatgtcagaagaccccagggaacaaggatcagggaaattgctgcctggagttcagggtcagggaacgagactgaacactgtagactgcagggctgaagggggtcgttcttaagtgttctctggaaactgctcaattgccaaccatctccagaagctccaacagactcctagtttacagcagggatgtagctggttctttctccagctatccctgaaagccttgtgcatcttaactggcctgcttgtccctgtgtccctttgacctgctgaggagaaggcctcagattctcctgcataggaaagaggagactgtgggaggcgctggggatgagttaaagatgtgcaatgcagctcacttggcaaaggtataagcttccagggcatcactgagcaaccccaacagtaccagcaaacgctagccacatgggttcgcatcatggaagagatggtatcagtttgcttaggtaaagacttacgacactttttctgctcacacctcttttgtcctaaaaagttttaagtgatggatgaatgtgtgtgtgtgtgtgtgtgtgtgtgtgtgtgtgtgtgtgtgtgtgtgtctaggatcaggtctggggtgtctgtgagggagtcatagatggggttaattgaggtggccagaggacacatcttcaatgtgggtgggtggtggccccactctgtagaccgaggcccagactgaatggaaaggagaaagcaagagaccatcagtcactctctgttccctgactgtgaacatgctgtggcagctgccttcaagctcctgccctcatacttgccctgccacgatggactggaccttgaactgtgaactcaaatagtccctactttccttaagttgcttctctggtattttgtcctagcagtgaaaaagtaactagtttgatatgcttataaagtaggtatacaagacaaatgtttactgataataaagcataaaaatgtactctaaagacaattattgatatacatatactcatactgtgtgttaaagcgtaaagcaagaactggagatgaagttcggtggtaaatagcacacctgcttttgcagaagattcaagttttgttcccagtacccactttgggtggctcacagcagcaggtaactctaactcctggggatgcagcgccctcttctggcctccttgtatacctgtaaacatgtgcacatacctatacacagacacacacacatacaaatatattttttaaatattaaaaaaaatacaggggcaggggctggagatggctcagtggttaagagcactgactgctttttcaaagttccagagtttaaatcccaacaaccacgtggtggctcacaaccttccagaatgaaatctgacaccctcttctggtgtgtctgaaaacagctacagtgtacttataataataaataaataaatcttggggctggagcaagcagggccggagcaagcagaggtcctgaattcaattcccagcaaccacatgatggctcacaaccatctgtacagctacagtgtactcatatacatacatacaataaataaataaatctttaaaaaaaatacaggtagtaagatggttctgttattgagagtacttgctgttcttgcaaaggacccaggttctattcccagctcctactcagagactcacactcacttgtaacttcagttccagagaatttgattccttctcaagtgctgtagccacatggtagacttaacaggcaagcaaaatactcatggatataaaataaaatgaaaactaaagattaaagcaagtttgcataacaacaagatggaaatgctctattataatcacataaggaattattctcagctgagtattcgtgatatggaacaacgtagactattgataatatttttgagtattgattaatattctaattttagcatcattaatgctgaaaatgccactttacataaatctatggcagagtatgtttagagccatttcttaaattactggaaattccgtcctaatctcaagccagaatttatttaatgatttttttttttttaaaactcaagtcagcaacccaaacagcaacctgtaaactcagacattctagggaactggagaggccactcagcagctaagagcactggctgctcttccaggggacctcagttcaactcccagcaaccacatggtggctcacaaccatcagtaatggaatctgatgccctcttctggtgtgtctgaagacagctccagtgtactcaaatccataaaataaaaaaatctaaaaatcaaacattctaatacaacccaatccagagacctcctagcttgatcctacctgatgaagaatgctcatactgtgaataaactattgcgttcttataggaacagaaattttaaaaaggtatgtacagaagcacctggaaagccctctcatggaaccaccctgaatatgaaccaagatgctccaggtagcgagtactggccttgtgtgtcatagcagccttcagagtgcagggtacacgcctgtgtgctcagaaccaagcctgtagcggagtcacatgactcggctcctgcaactccagccagaaacatctcagattcattatgggtttcattctgaattaagtatgtgttgttgcatgctcgggaggcttttatggttgccacatttttcagaggccccagagtcagttacaaagccatgtcacaatccaccatttaagaggctgtggcttgagccactatctcccggctattacatttagccaaatgattgcctaattgatatgccttccttctttggaagccacgaggttatggacccagaagttcagacttgcagaacagtgcccttgattcagtggtagcaaagaatgataaaatatgctagtggtgacttgtttgtcaatttggcatcacctaggatcactgggagagatataaaggatggttgtcccgtgaacatgtctgtgagggattgtcttgattgtgggaattgatgtgggaagaacaaacctgactatacagtaccattctcttatttggggctgtagacagtattagctgagcacagagcatgcattctctctctctctctccctctctctctctcccccaccctctcactctccttgactagggatatgattgggaccctagacagcactagctgagctctgagcatgcatgcatttctctttttctgttcttgactatggatatgatgtgactggctactccaagctcctgcctgtagcttgtttacagtaacagactgggagtcatgagctaaaacaaccctttttctcccctcagttccttgttgtcaggatattttaccacaggaaaagcaaggaaactagggcagagttaatgccgaactctagattactatctcattcatgaatatttcccacagggtttcaacatgcacccccccccctactttgaagatatcacttgtctttattcttcaaggctaaaccagttgcttcatgaaaatggctctggtgaactctttaacataagggctcacgcctccgggagacatccttaccttcataatggctgttgagcaagactggatcccagtaattacttctttcttctgccacaaggctcagcacactggcctgcatgagtggctatgttgatttggaaaggaggcaggcccaaacccttgcttgctgtctgtggatgttttcttgctaggatggcggagatgatttgaagcacacggtaacaatacccacatggctgagagcttttgctctgtgggccttcacaggaaaagctcctgtgagggtttgtgtatggtcggcccagggagtggcactattagaaggtgtgaccctgtttgagtaggtgtggctttttggagtaggcttggcactgtgggtgtgggctttaagaccccatcctagctacctggaagtgagtattttgctcgcagccttgatgatgcagaagatgaggagcatgatgcagaactctcagctcctcctgcaccaggcctgcctggatgctgccctgctcttgctttgatgataatggactgaacctctgaacctgtaagccagctccaattaaatgctgtccttataagagttgccttggtcatggtgtctgttcacagcagtaaaaccctaagacagctccccagcccaattctatcagattgtaaattagtattattcattttaatattccctacggtgcttagatattgcctatgtggtatgagtcaccaccttccactctttcccagccagaacgttgcattaaagttttagaaatgtcccctcatgggagcacaggagcttgaggagaggaactgacttcagccagtcactttattcattgtgtgtgtgtcatccaaagcagaaacacgctctgcactaagcccagggctagggcctttggatatgaagtagccccacaaaagtgtgtgtgtgtgtgttaaaggcttggtctccagctggtgtcactattgacaagtggctgaatcacagaagtgttaacttcaataatgagtttgttaaatggatgattggaagacagagcctagctggtagaagtagctcattgggtgtatctctgaagaggcgtgttttgtctcaggcacctcctagctcagctctcattcctctcctgcacctcacctctgcttcctggctgctgtgaaggaagttgctttcttttcgccacgtccatcctccatccgctttgatgctttgctctatcctaaaggcaacagagccataaactgtataaactaacacctcggaagacatggtccaggagacatccttcctgctctcagtcaacatccttgggtatcttagtacaaagatggaaactgcctaacactgtgtgagaccagacaatgtctcaagttccagattcctgttataaagccacatggaacgctcgcacaggtttgcagaggcctgtggaacttacgctaacacagctctgtttggttttcctgtgcacactggaggcttcagtgacttcccccaagtccccagacctgttagcaaatcctaccctggaattcagctcttgnnnnnnnnnnnnnnnnnnnnnnnnnnnnnnnnnnnnnnnnnnnnnnnnnnnnnnnnnnnnnnnnnnnnnnnnnnnnnnnnnnnnnnnnnnnnnnnnnnnnnnnnnnnnnnnnnnnnnnnnnnnnnnnnnnnnnnnnnnnnnnnnnnnnnnnnnnnnnnnnnnnnnnnnnnnnnnnnnnnnnnnnnnnnnnnnnnnnnnnnnnnnnnnnnnnnnnnnnnnnnnnnnnnnnnnnnnnnnnnnnnnnnnnnnnnnnnnnnnnnnnnnnnnnnnnnnnnnnnnnnnnnnnnnnnnnnnnnnnnnnnnnnnnnnnnnnnnnnnnnnnnnnnnnnnnnnnnnnnnnnnnnnnnnnnnnnnnnnnnnnnnnnnnnnnnnnnnnnnnnnnnnnnnnnnnnnnnnnnnnnnnnnnnnnnnnnnnnnnnnnnnnnnnnnnnnnnnnnnnnnnnnnnnnnnnnnnnnnnnnnnnnnnnnnnnnnnnnnnnnnnnnnnnnnnnnnnnnnnnnnnnnnnnnnnnnnnnnnnnnnnnnnnnnnnnnnnnnnnnnnnnnnnnnnnnnnnnnnnnnnnnnnnnnnnnnnnnnnnnnnnnnnnnnnnnnnnnnnnnnnnnnnnnnnnnnnnnnnnnnnaatttgcctacctttgcctcccaagtgctgggattaaaggtatgtgccaccatgcccagcttgtttggtagttcttaagactaggaatccttgtgaagctatggaaggtccacggttctgggtctctcaggactgcactcatttcatgactgaaaacggaagtgcctgctttctggctcactactggggctgttgactggcctcaggtcctgtgagttgctggccagagacaatagttccctgtcacacagtgcttcttgtgtatacgtgtatgtacaggtgttgggggaaatgcaggttttatttgatgcaagcgctctctgggaggaggaaacagaaacattcagacaggcttgggtcatgggagattcttgtcctaatcatcaggaagttgagctgctttaccatctgcctgcctaaggcagtagtggtactgacagtactaataaccaacacagagtgaccgctccccttcgcaccaagcactgggtcaagttctttcatgggctcattcttactttctgaacagaacccttctaggaaggaagagtccataaactctgaaacatgaaggtgaagtgactcaccaaacagacctgaggagaacggagttaggatggtgcctggtggtagctttagatccatcttacaccatggtctcctagctggagatttaagctggggcaagcttgtgatcaggtttttcccactctgctttgctctctccagccctggacacttttcctggtctgacttggtcctctgtacctttggtgccagacttctgcaaagtagtctatggtttttccttccagctgtgtgagtgcgatgtccgatccaaccactaaacttgctaaggaaacaggcgagattctgcttactaagataaaggttcacttttcagctcaacaaggctgtgacagtcacttaagaaccagggagttcatgtatacggtggctcacacacagaagcaccctgaacagactagaagccattttctttctttatcgaaaagctgtaaaatctggagcatgcgctctccgaccatttctaaggtctgagagtaaacttgaggactctcggatcatctacagatgtgctcttactgatcgcctctcaaaacaaatattacagtccctggagtcttcttaaagcacacaccggatcacgtgactcatcttaaacacactctacatccaacttcaaatcctcccaacactctcaagttaaagcaatgtacagtgtccctctcagcatgacctctcccagtccgcgctacgatccgatctgcgtggtggctgtaccagtcttttcttgagtcccttgcgttcctctttccagcactgcagggtctttccttctctttcttttcttcctctgagccatcctttctgcggttctgcttcctcgggtaatgctcccatccggttgtccatcagtcttccctggactgctcctctagtgtttgccacagtttacacagcaggcgtacctggagctgactgacgtgggtgggaggacaggaccactgctctccagttccccgctagagtacgtcctcatgctttcccacgggctccttctttgtccttgtccacatcatgaccctgagtttccttatgtttctgaaccgtgttccgcagtgttctcagataaactcactttatattaaggagccacgcaagtatgaagacttcagtttgaattcccagaaccataaaaggctggctatgaccgcaggtgcctataatcccaacgccctgaggcagtggttctcaaccttcctaatgctgtgaccctttaatacaactccttgtgttgtggtgacccccgattataaaaattatttctgttgctacatcataactgccattttgctactgtcatgagtcaccatggaaatacttttggagatagaagtttgacacaaggatcaagacccacaggttgagacaggaggctaacctggtgtgtcaaaaggaccaacatctgagcatgtaatttgacctccacatgctatgccttagtacatgtatgcccactctcacacacaaagatgaagggatggtcccacacaggtgacttgtgttttataatttattgttaattgtttctactccccttcacatggggcctcccgccattaaacagccaagaggaagaagacagagaaactcatcagggaacatctgcaacaccagagacacccaaaatgtctaaaatgagagtcgccagataaattctgttattttagattaatagaacattggctcatgaaacatgggcaaaaataaacgctgccattttaatgtgcacttttctgagaaaggccatgtcacctctttgttctaagggattggttaatattccactatgaatctcattaaaatttacatgtttaataaatgttggatattaaaatggtggtgaggaggtctatttatggaagctgttcattttccctgatgagagtctatttatttttataaggaaaccggcaaagttaatcaccaggttgggagtggctgagcctattagttaggtacatttgttcatttacctaacctttgacaatgagcaacggaacataattttattttgcaaatttacaggacttaatctttacacacattttaaagattctggtgttccctaacaagatggacagttgtgaatgtacacgagaaaccagtgaaatattagccggcccttgtttctacattaacctctgtacctgccaagagggcttctaacactgcaatgaccctgcggatctttagttctgacttttgtccttttggggatgggcggagctagttgtggaggaaggagaaggtacaagcaaactgccccagacaaggaaaagttcctacgtttcagttggctagagtgaaaattgggcaatagctaatacagtccaggaaaagttaatttggtgacggaacgtaggcaggtgtaaataatgaattcttgcagtcaaaagattgagctaaaaaaaaaaaaaaaaaaaaaaaaaaaagtcctggagaacacagcaaaaagaatgtgacatttatgtgtgtgtccgcctggctacatcttactgcagctcggacgacatctgcccactccaagttttcagagcagcagggcggggacagagaatgtagcgacccagccactcactctggcacgttcagcacagcggctggacccacgcgcctagggccccgcaccgcgcctgcgcgcccagtcacgtggcgggcgccccgcgctgagcgggttaaaagtcacggccgccgagcacccggccgagccgtgctctctgttccttcggtcgactgggacgtgggaccttctgctgctcgagtcggaatccgcgcggggaagcgagccgaacctcctggtgcccttccccagggccccgaacgggctcgcgcgcgaaaccgcgtctttcaactgacaatgaaatcgtagccacggccggcggcgaataggcgggaggccgcgaggcggagggggtggagggccattcagccgaagccccgcccaaggccccgctcgcgctcctattggcgcacgccgccattccggccccgccccttaacggacctgtcgctctgtgacaggcggaggggccagttcctgttgggcgagggggcggagtcaaaggttgcctgagctccgcccggactccagggggctcctccccttttgtgctcctcgcggctgggcgggcgggggaatgtcattgccgctccgagccgccgctcctctggcgccctcgtcccgtcggctctcgccgccaccgccgcctcctcagccgcacgggggacacggatggctagtggggcgcaggggccttttgggttgagaccgcgacggtcgcggccactgttgaggcggagacttcggaatcgctgccgcctcccaaccacccccagtgtcccggcctcgcggtgctgagggcgggagcgcgcccagctcttcctccgcctccgcctcctcctcctcctcgttgtcgtcgccgtcgccctcctcctcctcctctgggtctccgcccagcacccctcgctccaggcggcggcggtggccgcggaggacgagcgagacccgccgccggggcacaacatggcggagccctcggccccggagagcaagcacaagtcgtccctcaactcgtccccgtggagcggcctcatggctctggggaacagccgccacgggcaccatgggcccggaacccagagcgcgtccagggcggcggcgccgaagccggggccccccgcggggctgtccgggggcttgtcgcagccggccgggtggcagtcgttgctctccttcaccatcctcttcctggcctggctggccggcttcagctcgcgcctcttcgccgtcatccgcttcgagagcatcatccacgagttcgacccgtggtgagtgtgcccgcccttcccccgcaggcagcccgcggtccccgtttgtctggagcccctcggatcccacctggtctcccgcgggccgggccgggcgcgccccctgcccgcttggcgaagtttgcctgggagcggagcctgggtcctcggccgccggggtgggccggctccgcgcggcgcctcttcgccgccgcgccccggcttgctccgggggcccccttccccacgccctctccgccgcagctttgcgccgtgttgcattttatttcatttctctccttcctgccatcggagcagccccgggattgccttctggctgctggaggtgactggagccccttgtccgctcagcctcgcagtttcatgctttctttccgggagagtggagtgttagaatgtaggggggaaaatattatcccgaaagcgagcgcagtggtagcgcctcgtgtttttccagcaccaggtattttccggagtgtctctttcccccctaaggcccttaagtgctctcagctcgccacactatttgcacagttgtattgcgttgctttttagagcgagatcgtttttctgttagccgaactctcaccctcgttgttgctacaatatccgactgggttgcatgagttcttttattggtgtctgctggaaggtctgtggagaagagagcaagccgtaccacagtgctgagagtctagactgcggtgccgaagttgcacgctctgcatggcactcactggttttagggacttaacttcgaacactgagttacctacacgggaagattgcttttcactttcttcctcctggcccaacctgagttaagttttttgttgttgtttttttttttttcccccagagagagattgagagcgagcgccagcgcgcctctttaaactagtttattcttcaggctgccctatcaaccttgaattaatcttacttgtaattagacataattaaacggtagggtatttgtcttaccatttgaaatgcacagagaatcttcttaagagttagtacatatataggttataaatgagttttggggggggggcttatgtgttaagtatcagatttaagttgtactttaagaaaaatatttatgctgcaatatctattgaacaccagaggggcctactcaaggaaaacctgtttagagaagcagtgagctacagtgatggcctgctgtgaggtgttttcgtcctattttaagaggtttccatttttttctaacattagatttgctttataaatgaccattatgttatttggaaccagaggagaaaatcatgttggtggaggcatacgaacctacgaatatttgtgaagtcttaactaactagatagagtattcttttgaaacaatcaattagattaaaactgagattgaccagaaatgaaagccgcagaatttactgaacaacatgaaaagagaaagttgtgtcttttcagatgaagatagcacggggtggaacaaaaactggaaatatttccagggtaattgtacagatacttccatgaagtaacattttttacaaatggaaggctgggaactgttaggagtgcactcagaagctgaaattaataattacagataaatgcacaaataaatgacaaggcgattttaaagtttctttttgtcattttcccctagtaaagctgcacttgaggcggcttagattagatggctttaggaattgaagagcataactttttttattcatgaaaatctattttgtttctattctgctgtgtatggaaacagttctttgacttgagtctgctccacttaaattttaattcacattgctgatctgcaagtgtccacagctaaggcctacctacttaactaagctctcccatctaccagcggtagtgttaaatgtttgtttatttttgatgaaatgttatgcttggaatgttagagcattctaattagcagataggtgtagtaaaggaattttccctgcctgcaccccatcttgcatcgggacttgtctgtgtgaatctcatggaatgcctaactcaagagacctaatgagagaaatcaagttcaaacaaaaagaatactgtgctcactttaggttttcttttcatagctgttactaataggcatgccattcattcttccatctcataatcattcttgaaaattttttacaagggaggttgtatagcttgcctgtcattacttttgacttttaaaacagttttctccaaagctaataacagcagtctctcacactagtttggaagtggctcagattacagcgcagtaatgacaggaacctttagtaatatttaaatgttctctctgcctgtttctacaaaccaattctggcctgccccatacctccttcagtccctcttcccccttccatttctgtatcctttttgtgaaaggctgttgatggtgagttgcttctgtaaattttatcttgaattgtgagacttcagatagctgccaaaggtgagttgtcaccaagttacacctgtttttaactttttccctgaagttataaatcttaccagctgctgtaagaggtaggctatgaggttattgacttaactaccttttatttagatcatttggcaacgtttggggttatgatctcaccttttgtgccagtgagtttctccctcctcagctgagttggtgagattccgggcagcagtggaagttattctgtaggtaccagacatttggttgaccaactagtttaacgagcatgtgtctaacgcatccttttatctgacactgtatgtagtccttgcatagttttgctgtgattgtgaatgcatgtatgttccattaaccagacctttcctgctagctctgacaggttgtggtagctctccctgttagcactactttgagatatccttgttcttgtagaaccgctttttaggggctcctctctggagagaatttgggaatttagaatttaaagttttaggttttagctgaaactatgtataaataggttaattagtgcaaacagtttcaaaggagtgataagccttgaaagtaagctgttaggagttgggggctgcttcctgtcttttgaggtctcccatgtttttcttcactttacaaatgacaaaaaaacaaactgttgacctcatatctgaagaagacagaatggttagcaaaagcaagcagtgtagaacagaaagtttcccggatcttttaaagcctccgtgactgggatcattagcagcagcaggccggcagcacttccaggtgggatacaccaccactgttttcattgtaatctacactctctggcccggagcttctgggatcctcgagttagaagtacatgtaataggaagtgcttgagtggctgcatctgatgatggctttgaatccgtgcccacttgcagtcactgttctcctctggtagtcatcatggctttcctgaagcatgagatagatcctgaagcagctaggatctgtcttttaagcccttggaatctttgctttttcttgagggttttctttgctttaggaccagactaagcaggattccatgcttaaagacatacgtggcttgcatgaagacagttggttgtctaccaagcattagaaactaaaggtttccttctctggctctgaacctatggatgtggaaatgtcttagcagcctgtctgtaccttgacctccagtcttcatgctctcaaaagtgttgcatgtatagaaaaaatataagatagcctttgttgtactgtcttaatattcaccagtccacctgtgttctcagaagtaattaataccaaggccgatgttttctacagtgaaatcatagacaccacagcactgcagctgctttgagttaaaagcctctgcatttcagtagatctgccttctgctaagtgattgtgctataagttttcaacatacgggaaagttgaattttagagtgaacattcacatcactactgcctatgttctctgattgatggttatttttttgttttgttttgttttttgttttttttttttcgagacagggtttctctgtatagccctggctgtcctggagctcactttgtagaccaggctggcctcgaactcagaaatccgcctgcctctgcctcccaagtgctgggattaaaggcgtgcgccaccacgcccggcttaatgtatttttcttaactcttcaatgtctctggctgtgcttacacccttcttctagactctgaaatctaaagagactactggtgcgttgtccagtgataaaggatgctaccttgcttcctctactccatgataagggacaactttatttctggactgcatttggtttctgtaaaagctgaacccagcatatacaaataactgtttttgtatcttcacttggagtgcaggccaggatcagattccatccctttcaggttttggtcagtaattttacctgagtacactgtaagccatgtttgttaaatgacttggctctgttgtctagagagaaaaatctgaagtggttgagttttggttttattctatttcacttatgaagaacttggaaagtcttgattgtcttattattcagcctgttgtcactaccatgtttcatccaaacaagagaggcctaaaaagcatatacaggacctgaaagcatgtacacccaaatgaaaggggcacgataggggccgccctgctgattctgaatattacttgtcagtgtgaaccagcctcctcttccttcctcccaggagcttgctatgacgcccaagctggcaggtggggttacagtgtgtcctgcttctcactccaccttctgccctgagtacttacctgaaacttagaaatggatagagatggtagtacgtgggataaagaaaagagctccacgtctagtgggagtaagtgtagggagagttccagaagcgtctgtaactggagcaaatttgtttactgatgttgtaggctggccaaagtattgagccactttttatagtttgtgagtatttgaaaagtgcttccttagtctgagacatgtaaacgttttggaatatacttttcaacataaattagtaaatgtctgtttattcacatctgtaccaatattctattcaaatttgtatcatttaaagataagcaaatctgtgaattgcagtaattaagttagccatatcatctgtaaccctttctttgtggaacttaatgttgtaggaaacattaacagaatttccaagtgataagtgcaagttcaacagtatcttactttgtaatattcacctttcgcttgagggaaggggtaaaatcttttgtttcatagacaaacattttagttcaatggtttccagatctgcctgatttcaaaatctgtttttatgtaccctgcctgtaatgcaggtttaaaagaaaatgtgtctcttgctctttttttttttttttttttttttatcctttctgaaactgtattgctcagccctggctatcctggaactcgctctgtagactagggaggcttcaaactcagagatcgcctgcctctgcttcctgaatgctgggattaaaggtgcccaccaccaatttaatttgttttgcttcttagtcatccgttctaagtctttactcattggcccatcaaaaatgcttggtcccagccctctctaatgaagttagcttgctagttggatgatagctagttatttgcttgttttaatgtaggggaagatgaaaagttgatataggttttgcttttttgttgaagatgagtaatgaattttcagaagtgggccttttacaaagtagcccattgagaagagaagatgattgaatctagttaaatattttcactaaggtttgtctgtaaaaggttcataatgttgagtttggaggtattaagccatcccagcatggggattttgagtggacagctatgctcttagactcagaattctagaggtaaatagatttttaaagtacatgtgatcccttatctggtttcctagacagagggcctgagagctgcataaactacccacagggagctgaggcctcctcagagtgaggtgttgtttttggggggcttttttaaagttataacttcagaatatgagaagacattctttgtgtattaccactcattttgaattgagggtgttgaaaataatacttcacacatagatgtggaaacaggacttttgtataaagtttaatttggagttggtgatataaaaaagctgtgggtatgaatacctgtcgctgccataaattaagttataaaactattctttttttactgtgtgctcgtctttatcaaaagaaatgttcttggatagagtagtcaaattttagtcattattagtaaaattctaaagtatcagttgataagcaagttgtataaacttataacccttcccagttataatagtttttcccccagtatgtttttttaaaagtgatctctagcaatcctttcaatttaacaagacttccaatattatttttaacttaagatatgcacaggtttttgttctctccttttcttggtatctaacggtgcaattgatagtgtgtacgtgcacacttgtgtactaatgttgaaggtgagcttttgtctgcagcattacaaaaattaaaatgtgtagtaactcattcctaaagtgtgcattatgcacacattacattattttatttcaggtcagatttgtctaaagaaaagcatgagaccaaattgaatggcatcatagaaaaggattgtgcaagtttatttatgaaaataaattatttcaccatgtgcaatccacagcaaaaacagtgaatgtagaattatcaaagacaaagagcactgttatagtctctgaaagtaagtctcaagtgcttaaacaaaagagcagaaagtgcagtgcagaggcttttcttataggtgaaagggctttcagccttaggaaggatccagtgcacagtcaaatgaggacctcatctgaccattgtgctcatagccattttcatctcctgtgacactgcttctccagccctgtctcccacattgtgacggaacctaagtaacggtcctgaccgtgtcgtaggtggtgagtgagctttctgtttgctacgctgacagcttagttaacctgcttagttaacctgtttttagtaagccgagctgtaacgttatcccgctcttttgctcatctgttttggttggaagagtcagagcatctggccagcaagaaaggctcagcagtccagcacctgagatattgcctgttctctctgtagcagggcgtacctgtaaaaaggaagggaaaagctaacaaggtaacaagtgatcttgtaaagaatttttctaatatatattttatatgttttatctgcatgtatgcatgtctgtgtatcatttgcctacaaaaacccagttacgattttgcaatgccatgtaagtattggagattgaaccttggtcctctagaagagcagtcagtgctcttagccactgagccatctctccagccctagataacaaatgatcttaaagccaactctttagatagagtcatccttttctctagataatccttgaaggattgaatcactcagaagacacagaggatataggaagcaaagcatggggacatcatttgggagacaaatgataatggaataaaaacagttactgttcaagaactgggctttggggaaggagcagccgtggtgttggccatgctagtgctagctgttttgagagactgagaggtgcaggggtgatgaccacccctacctacactcacactgcactcctgccacctcatggcatgcctgcgccagttctctctccctggggtttgctcacccatgtctcttctaccagggccagccctggtatgctgcccaggtgatgttcagggccagcttacccgctcttacgacctcggagtcactctcctgactggatcgagggggcagagggcaccccaccaccaccacttcacagtagaagagtggcagagccagctctccctagctctgccctcagagccgtctcctcctctctccctcgcttcctcttgacctgggccagcattactgagctgaccatgtgaggtgcaaggcctgctttcccaagtgaagtgcaaaatagctcccctgagcacatgaccctgtgggcagctttctcaactgctggagatggtgaggggcagagggtgagcatcacctctgtgccaccccacagcagacagtctccaattccacctctcttcataatgctaaaactgctctacttctttctctcccatttgagcaccacatacatgtggtgccatgtcctgtttgggccctccctgcctcccacaggctggccatgtggctggtgggcccctgggtgacatcattcatgctgtgggcgtagtggcaagtgggtgtctatgactcctgcccctctggagggcagagggcaggtctttgtctgttttcctctacctgtgccatgctgcctggacttgacttcaatttttatgagtcctaggcataggacagctttggccatcaagccaggatgcacaaggcactgccatctgctctgcccttgactgataagaaaccaccaccaccaaggtgtcttcattgctaattacaaagtgtgtgtgtgtgcacgcgcgtgcgccttttgtgttttcagacaggatttcactatgcagtttaggctggactagaacttgtgaggtagtgcacaccagcctggaattctccatcctgcctgcactgccccttcctaactctaaacctcccaagtgccaggaccatgcctaacagtaattacttgctttgttgtttgggataaggggtgtgtgtgcgcgcatatgcatgctcacatatgtgaggtttgtcttccttggatcacccactgcccgtaatccaggacttgtcacttgaacccagagtttgctgattgagctaatctagccagccagctcagggactcctccttgtctccacttctcagcaaagcaggattacaaagtaggatgctggggatccgagcaccagtcctcaaactttacccataattctggaaagaggatgtagacatctgagctgaaagaatttaggaaagtcctaagagggtactgtttgatatgttgggggttgacatatgaccctttcacaggagtcatctaagaccatcagaaaacacatttatgactcctaacagtagcaaaatgacagctgtgaagaagcaacagaaatactgttatggctagggtcaccacagcatggggagctgtattaaagagtcacagcattaggagactgagagccactgctctagtgttcctgtggttactaagttgtaccctttttggtttgtttccctgattgtttactggctgtgtcaggcttcaggaatattgagaaagtcatattctgaagagtttctcaaaaatcatcttcaaggataaagttaattcaaagaatgataaaagatcattggccttcatgtaagaacctgacctttactgggctctgaaaattgggtgtctgttagcaaacactttatgatatcaggaaagtgactctagttgggaaggcttcctttaataattagcacttaagtgaaacaaatagaaaacttgcatgcatttctctctggtgattagaatggtttggtctgatttggtggtggtctctgctatgtgttagtataaaccctcatgctacttgagtggataacggtttcttttgtaaacagataatgggccgttgtcaaacttaatttattgctgaagaaaaaaaaattaaatctagaactgcctttcttaaaactcagttgagtcagccagcatttgaattatagtccagattttaaaacttaagccagctatcctatgaaagatacttaacatatgccatcatcctaaactccatgcacggaacaatccaagtgccttgagggtagactccacctgggtaccggtcagtgtaaggatggaggccctctttagtgctcctgagagagactcctcttgaatgaattccgaactggagatgttctcctaagtgtcttaagtgttgcgagccataccaggtagattcttttcagaaaagccaccggaaggttagtcagtataggctctatcactaacattataggacattatagaaggttagtcagtataggctctatcactaacattatagaacattatagagggttagtcagtataggctctatcactaacattataggacattatagaaggttagtcagtataggctctatcactaacattatagaacattatagaaggttagtcagtataggctctatcactaacattataggacagtcttttgctaaactttactgaggactgcgcagctgaatgaacaggccggagccatttgttgaagttttacatctatagggtaaaaatagactaggtttctgtggttacgagttgttttgttttgttttctgaatttgtaaaacagtcatttggattttgacgctcataggcccctgtagtaagtgatgatttaatgtgaccacagaaagcagaaaaagttcctttcagtcaagaacatcatttgtattctccctgcagtattttgcacagtattaggggcctggtgaatactcagtgaatattgaaaaccttttgtctctaactatataccgtcttataaattaacttcgtcttaaactatgcgtcttgttttggtgaaacagtcatgtattaagtctctcggatgtggctgtaatgtcagaagagtcagatgcactgaacgctgtaactccaccctcacaggtatattttagtcctaaggacgaggaaagctgctggagaagagatgggactaactgcagaagagagatgtgagcatcactggcggctgctagctttgagggtagatagctgactggatgcagtcagaagaacgtcaagagaaagtgttcttttagttgtatgcagttttcttacaagcacaaatctgagttccttttcatgttttaactcataagttaaggaacattgagtcagacaagaaaaagactagttaatatctacaagctgcctgaattataaaaattgcattgttaatttttgagatggtgaatggaaaagatgccatctcaataacagtgagtttacaaactagagttgagggataataagagctgaagttattgtgccttaacactagttagttgtactaaattcacgctgacagtgagtttaggtagggttagattactgctccatccatcactcttgactgaactcagtgacatgcaaatccagcagcacttcagaaagcattggaactttgacctattaaacttagaaattaaaggatactaaataaaaatactcattagaacaaggcaattgctgtattgtgaaagagtctttgcagtggaaataactttgtgcctaattattaggtgggtcattggatagtagcttttagtaaattagtgttaaataagccaaaataggaagcccttatccttttttaaattgttatttaaagcttaatagaaatgactggtctgttaagtattcctgtgagtccttgaactgaaaacctagaattgacctcacaggatttttttttttttaacttaacaaaactatctgcctaaaaaacatcctttgtccatcaatgtagtttaaaaagagtctgttagtacatgttcatagccccaagtttagtccctggcacagcaaaaggacgacaacacaggtaaaaccgaatcttgagtgggatttgttcagcacattaaccaacattttatattcactgacttttaaaaacttaatacacctgtccataggcccaagatctggtttccacaacatgtttgttctagactttaaccaagagagactttcattttaacatgctacacagctgacatttgaaggagaggaacaggatggtgaagccatgtaagataatgaaatggatctaattttaacatggtttaaaggccagtcgtatgctcagagtagaggaaatgagcttgaacaactgactttaaaaatccagctatttatggttgttaaattgagacagtcacttcattaaaagggagacacccttcccccctttaagatagtaattttggttgtcaagtgactgaacttaaacaatctaatataaacaaccttgatacaaaagatttttcttttaaaataaaactattttgaatacttaaaaagtatttatatcatttaagttatgttaattaggcctattgggcctgaatcacagcataaggcattgctaataggttggggtatatttaaaacgtaacctgcacattagtggaatgtgtgtattctgtataattgtgaaacttactgttgatattggaaacctacccagcggctgcagaattgagcaccaaattcatatttacctgtttcttctctagcctgtttctcatatttttcctgttgcaactaggaaaacattttgacttcataaatgtcttgattatatgtgtatgtgtatatggcaggtgtgtgcacctgagcgtaggtatctagagtctaggagtgggcgctcaggttctctggagctcaagttacagtagttgtgagttctaggcttttttctatcatagataatgttaatgataaaacttttctgatatatacatgtgtaagtttgatagcggtgtacttgcactgacgtaatattcagctatttataaagatgccatctcaacacctagtggacagcagccagcggttttcaccatcctgtgggccggcgaggaagttgtgccagcctgcattttgagagcgttatggttgtctccacaggctgtagcgggctggggcgggaatgcctcagatgcctgggcattggtgacatgctggaactctgaccatgcattaatcaggatttggctctttcctgtattacataggctgcctcactgcatgcttcctgggctccaaaagagaatcccaagatgggagaagcctcctggttgataaaaggcatgagtggacagcatcatttccaatctaatttattgttcaggtgatatagacttacctcagtgtcaagagagaacactggtatatgggtgcagaattatttaggagcatctttagatattctaccacattatgtttattattttaatctcctgtgaatatctttggccactttggctttttgtttgttttttatttgcttatatttgaagcagtgactggctatataactcgggctgcttcctcctgccccaggttcccaagtgctggagtaacagtcatacatcactgtccttgtcaaccttagtgcttggtcctaaccagtttttaaattagcttctttgtcttaatgattttggcagggggaggacggggagagggttgagacaaggtttctctttatagccctggctgtcctggaactcactttgtagtccaggctgacctgcctctgcctcccaagtgctgggatcaaaggcgtgcaccaccactgcgtggcttgtcttaatgatatgataagagctttcatatatacatctttatttaatatatgtatacagtttacactaaaggttaaacaggtattttatttcagcttgtgacttacacaatcctatggtatttatattttatttccccaactttatagatgtgctttagtttgtgtgttaaaagaatgtactcttgaagtcagatagcttccaaagatgacattttgttttaaagaacagcatttgcaaaagtgtgcagtgagatgtccatcagccaatctgttatatcctctcttgacagtgattaactgatcactctgtgtgacgtttgttaggtgtacaccgagaacaggtaatgctggagaaggtgcggagagtgacggctcccgagcaggtacatctagctccaggtggtttccagtgtcgctcacttccctagttcttggcttcccctcttgagttactcgtttggatcgttcggtcactatctgcccagactttgcacacttgttttccacagcgaggctagttactgtcagtgttctttctgagtgtgctctctcttctcagggtatgaagggtttgcctgagactcgggattttcttgcctacctctacttccatactttattctagaaagtaaggttcttaagtattgtggctaaaatactttgagcgtgtgtattgagatgtttgtcctatgttcttagaacgctgtagacaggtcagttgaagcatgactgagttacctgagaagtgagcgtgccacggagcaggactgaagtgcagaacacaaagttgagggaagtgaagccactttttttcaggcctgaacaaataggaaatgatggaaatacacttgaagacacttctccgctttcaaatcaggcagatttgtgtgtattttcaatttatttcaattctgtttgttgacagcaccccagtaggcctcgtgcaaacatgccaccccatgtttcttgaatttaatccccgaatgcagtaccacacacctttagtccttaatcctagcagtaggccagcaatctgtgagttcaggctagcctgattgcatggtaagttccaggccagtcagaggctttaataaggctaagtaaagagcctttgtctcagcagacaaacaaacaaacaaataataaattcggatgatggaagtagaagttaaacatcagaagggttttcatgcagtagacacacagcttcttcgggctcttttttgagtgcatggttcatgccctgacataaacaggtggaaattggaggaccactgagccggcttgccagccctctagttagtttttcaaaaagtcaagtatagccaggtgtagtgggtccacacgtaatctctgcacttggaaggctgaggtggaagtatcccaaggttaaggccaagctggcctcagaggaagagcctttcccaaaacagaacaaagagcatgtccttgatagtgcagagaccctctcttccgggggactgatggaaatggcagcagttaaaaccttaatgccttgctgtgaagctttgctgggtgttgtcagatcttcggagtttattgtccacctcactgagggaaaagagtgacagtgacttaaaggagtgaccagacagctgcagacgttactcagcccttcactttctcttgtgctcaccacaagagaagccggtgctgtgtctcagcacacacatgctcttctgctgaagaaggtctggtattatagaggcccacctgccagtgggtggaggtaagggagcgttatcccagggctaagccgcagcttcatgtgcaccgatgagtaccttcagcgtaccgcagggcctgtctgctctctttaggtcttttccttcagagtggacttggagctctttttcatgcatcattggttagttctctgctgtactgaagcactactatggatggatacctttctttgaatttccatatctgaagttataaacttgattgttgagacagtgcctttaagatgtcagctggtgcaagtaggtttaaattgcctttggctacagtgaaataaagctggctttcccaccctctgtgtacttaggaagctatctgtgaagtctgctgtccttggtttttgatcctgccactagatggcagggataataaaagatgaaatactagtgttagcgcctgcttgataggtgctgctctctagctctgctagtacaatttggggtgcatatgaagtctctcaactagacaacctacctaactctgtaagaaccactgtaaaacatgagtggagttaatgacaaggtaaaggagaaagaatggaaagctgtttttcatctttgaggtaatcattggtgttttaaaacagatctattgttttggtttgttttggtttggtttttttgagaaagggtgtctctgtgtagccctggctgtcctggaactcactttgtagaccaggctggcctcgaactcagaaatccgcctgcttctgcctcccgagtgctgggattaaaggcatgcgccaccaacctccacccggctaaagcagatatattattattattattattattattattgttgttgtttggttggttgcatgatgtgtatgggagggttcacatgccacagtgcatgtatcaaggttatgggacaactttgtagagtctgttctctcttttcgcatttacatgtgagtggatgtagcattttggagctggaactcaggttgccagttttttgtttttttttttttttgtcgaaattgatgccagttgctgagtgtctctcagctgaccatccgggttctgacctgcctttctgcatgcaccttgttgaatttgacttcttttttttttctcttgtgttaggcttcctttagcatctgtaactggtcatcctttcagggttcctatttgctttcctattgaatacctgttttaacatcaacattttaaatggttacatatgcaaaatcctagaacaatctgtataaaatgtagaacttgagagtatctatggaagtcttgccaagtaaagagcttgttgatagccttgaagaacaggataatgagaaactaaagggcagcatatgatgatgtgatgttatagaagactttgccttggctggagcttgtagctacagagtgcccggcactcatgaaccctgggtgtaatccccagcagcacataaatgaggtgaagttggcgcatgcctgtaatctagctcttgggaggaagagacagaaagaagttcaaggtcatcctccgctacatagtttgaggctaacctaggtaggatatatgagatttttgtctcaatagaaaaagaagacttcttggtcttctatgcaggctttcaccagatagtcctcgccggcattagaataaaccgacatattgacaagtacaggtgacttctgtgatgtttcagtcaagagttaagtcgtcatgactctcagacctatcaccccaagcaaatctcagttctgccagtagcctaagtgagtttaacttggaagagggttgtttcccagtggattcccccaaaggagagcccagccccacatgcactctaagccaaggacctacactgaactcagctgggattgtgacccacgaaagaatttggtagcaaggcactaacctaagcccgtgcaacttgctacacaaaggtagagaacaaatagaaatgcccttcatagcccttgtttcttctcatcttgctactgcctaacatctaatcaaggaatagttcatgagtccctcgtctgtaccagactctggatataatcttgaagtcagcaggattctagtctagtagggaagatagacttaaaccaagaatgacagatgctgtgaaaggcgtgcgctgtgatgagagtgtagaagatttcagtcatgttcctgtctcacagacttgcccttgctttcattagcattatgaaatgctatgtacggttttttagccttcatacatgctttcctccttttagaacatttctgtttttctgcttggtaattagctcaggtttaagaaaatgccaattgtagaggccttctgtgagccctgttgatagctgggtttgtgagagttagactgtgccagtgccagtgccagagcaccgtgtaaggtaagctcctaaggacagacaggacctggcaaggaggctctggaactcctgaacactgctggtgagagggccggccaatggtaactcctgtgggaaacccttaatgttttctgaatacaggcttatagcctagaagtggagggagaaagtacttactaattcctgtccagagacaggaaatataatctttaaggctcggtcctgtatgagaatgcttaatccatcaggctatgctatgtctcactgttctcaactgggaacatccccacagcccatcagtaacagtaactgtggatagcagtcgtaagacaaatgcgcttagaagtgaaagggggcacaccactgctgcatgggcgaatctcagaaacaccctaacactgttatgtcactcttacataagggtagcaccatcctctttatcaaaagaaagcggagaatgaacaaatgagtgtatgtggtgaaagaagtcactgtttaaaaagggagttgactggaaaggtatgtgtgggaactttctgggctagcactgttagctcattgcatgaaacatgaaaataggtatgtatcagtgcgtaaaattttactccatttttttaaaatgtgtagtatgtacttgtttgtgtaggtgggtatgcatgttcgctcagccatagttcctttgttcctttatatatttactcatttattttttgactgtctcactggactgaagcacagtggttgactggtcacaggtctgggaccctttctccaactcagttctgaagttatcagcgctgactgagcaatcttctcagcccttacttcagatttccaaaatgaaaaaaaaaaaaaaccatatatatgattcaggtgttgtaacattcaggtgtagctatctgtgctattaatggtcagatgttagccctgcagagtcaggaagccagtctgcctctgttctcagttaccattgtgcacacatgcagcctcattcagtagttatgatggaaagttacttgagaactatagtttcttaaagttaatccatattttatggtcacattttcaggaaaaatacttgcactattgtagaattgtatgcttactgtttatgtgatatctagcgtctttctgtgccagaactcacaagacgtgtgtttgctagcgttagcctgctctggatatggatttgagatagtgtgaatgctgtttgtaagcatctaaacatctgacttctgaatggatggggcttcatttcctttaagcaggtgaaactgtgtccattgccttctgggtctcttcttgctatgccagtgttttgtgagaaggtaaagaaaaggagctagatgtgtgtttgtgtttgtgtgtgtgtgtgtgtgtgtgtgtgtacacattcctctgattgctcatagattttctaatagggctagctagttatgtctaagcgggattctttaggtaagaatctaggactctgaaattattgataaaatctcttccataaagacagtgttttgtataaggataggttccttcagttttcattctccagcctttgctgctgtgtggggaagttgtttttctcttccaggacactggagtaatactactagctgggaagagccgaggaatgaaatctgtaatggaggtgagccacccttagggtggggccatacttcgtagtccaaggcgccatttgtgtaatggaaatgttagaggcccaggagctaccaatgggatgggtttctgggaaaggcaaagcacggcgtcttcactgaatgttctgtgcatgggtaagttcctgttactaggagtaaataagctgtagagattgagggagaagcctggcataaatcagatgtggcttttaaatttagtaaaggacaattcaaagcaggaaactgagaatgagttgttaaacttgaatgatttatacatatcaaaatgcatgtttatgtatcttggaagatgttgctgtaacttacagcagaaacaacagacttaactttcttttttttgttttgttttggtttggtttttcgagacagggtttctctgtgtagccctggctgtcctggaactcactctgtaaaccaggctggccttgaactcagaaatccgcctgcctctgcctcccgagtgctgggattaaaggcgtgcgccaccacgcccggcagcagacttaactttcagcttgcctttctgccttccgtcctttctgtcgtgctggctgccttccttcctccctgagctccttgcctttttccatcctccttttgatttgatgttctaatttctactaagttttcaatcatgtatattgtatattaggaaggtaaaatggatttttgggttgttttgttttggaaagtaggaattcctgccaatcatttttgctatagagatgtatgcacaagagagcaaactttctgtgtgagaatggtctgtgtcctgtccttctgctgcactctgcgccaaagccattgctgttcaggagtgacacttgtaaggaagcagacacttttattattagctgttctcccaaagtagttcttaatactgggtagcacgcttgtctttggtggaaggagaggctgagccttgttgagagaaagggagaattgctcttatgctcgtgcgtatacatcccttcctaagacaagaagaagagcctagcacagtgggacagactagacatcagttcactgaaactagttctgtcaagattgacagaagttgaccttgggtccaggtagggcagagatggagacacactgctctgtttttcttttatgggagtaacacttggcttgtaagaaagcatttataaacttgataaggcctttaggaggtagtgattgtcacctatcaagcaggcctgatcaaggtttgttaggggccatggttacagtaactgttaaagagtttaaatctgaagcaacccagccattttgctggactcttctgtattggttccaaagtaacttaacaaaaggttccatgttactcctttctttcttttgagccagggtctcactatgtaatcctggctgtcctggaactcaccctgtaatccaggctcgcctccaactcacagagatctgcagcctctgcctcctgagccttgagtttaaaggcgtgtgctgccaccccatgtctggtttcaagttcattcttaaattttcttttaaagattcattttatgcttatgagtgtttagcctttgtgtgtgtgtgtgtgtgtgtgtgtgtgtgtgtgtgtgtgtgtaccatatgcatgctggtgctaaagagatcagaagtcattctagaaccaaggtcacagttgtgaactatcgtgtgggtgctagaaactgaacctgatcctcttctagagcaacaagtgctattaactgctgaaacatctcttcagccccacatcttaaaacaattaagagaactttatcagttcttagttacatgtttatagaatacatatctaaacatgaataaccagtgtttttcaaatactcttagctttgaaccctttcattaaatgagatttgtacaagtacccaaaatataacagagaagtgcagattaaatggaggacaacatgttctgtattccaattcttaggaacatagccaagggagagccttttggaactcctaagcacttttaaatctacttcaaaataacagtgcccagaaggggatgtgagtgaacgtctgcagcctccaccgctgccaccgccgccactgctgccaccgctgccaccactgccaccgctgctcagagtcatcctgggatcaagttgaagaatgtgggtgctggggctagagctgccatctcagccacttcatagcagtatgactttggccaggtgttagacatttgtgccttaatccagtcatctcattccgaggttttgtttgtgtttgtgaatgtgtgccagatgagagaatgaaaaaatgccatatttagtaccacacgttagaagaattgtaaacagtcttcagacctcataaccacgctccctctcaggaactgtgcccatagattgactacctggggagagactccccatcagcttaccctgtgggcgagttattcccttgttaatgattgatagaccagctcattacaggcaattccatcctgggcaggtgagcaagccatgaggctcaagccagtaagcattgttcctttgtgctctctgctccacttcctgccctcaggttcctgtcttgactgccctccatgatgggttatagtggggacatacaatctgaaataagcctcccttccccaaactgcttttggttcaaatgttttatcacaacattaccccagcatttgcagtagaaagcaagctaggcaggcttgcctttacttactagtttctttaacctctctctgagtaggtgactccttcattcttaagtgtcgtacagatggtgtgagatagaactttatccttgcttagaggagtctgtcctatcttctaaatttactcacattttgtggaacctttcccatctctaatctgctttgtgtttattgtatttaagccccagaaaaaccattttgtttttcaattttcttcgtacatcaaaaaagcttggtatataaatatacttgagaaattttaaaaaataaatgatttatcactttgtagaagtgatgcgtagaaaagccttgtgtagaggtgtgtgctatttattcgaatgttctgtcagacaagacttcctgggagtcttgtctctgtaggagcttgtgtttcctgatttatttatttttttaatacaaactatagttaacctaacttctcaacttaaagcaaattagaactcgagagaagggttcaaggctttgcctggtgttgtgttggcccatgccggcctccatctactccattcattctcttgtacaacactttctcttttgctttttgggtttctttgagacaggctctccttgtgtaggccatttggcctgggatttcacttcccagtgctcctcccctgagtactgagatcacaagctgtcactcctggcctttctggtttctcattgcccgcactcatcccagctgcctccccgggccgttacctttcttctctgctcctacttgattgttcctgccgtgtgccttgggtttggtgcgcagaggctgcgttagacttgtgctcttgccttgggtataaaagctttgtggactcaactgtttagatgtaagacagtgtttctttctcatctcccttgtattggtgtgctttttcactgctaaatggttgaggtcctccccccagtcatttttttgattgcttccttcttagtgtcactttattttagagttttttaaaatttatttttatgaaggctgtttctaaattgctgcagtatcttctgtgtttctctaaaaatgtgctaatcttggatctgagaatgtgatgcagaagtgaatagaactgagtatggtggcctacaccttcaatcccagcatttggaaaacaggaaggcagatctctgagttgttggccagcctggtctgtagagcaagtttcagattaaccagagccacatagcaacatactgtgtcaacccacaaagagtaattagaatacgaactatttacaggcccttgacaatcattttaattaaatgttatgaaaaaataataattctcacatctctcctcaagaaacaggcagtatttgattgattgcatacatacatttggatcctcttttggaggagaaacgttttagaacaaaagacagagctggcccttgggaaagtggctttccttttagtatgtttgtagcacacctgtggactaagagctgctctgatttactgcggtagctaagaaataggtgaaaattacttcccagcttttctggctcatattttacatataccatataatgctaaaacaatggtgggatcatagctcagtggaagagcatttccctggcatgcttgagactgaattccttccctagtagattaagtttagggtaaagcacaaaaacttacattgttgttcaatactggggtgcctagaggagtaaactgtgctgccattacttgactcttgtaagcaaagcgccaggagcatgaagtccttccgaggatcacccaggcactctcacgcacccgctcatgagtgaagaacagagaataagttgtgtgtttggcaaggtaagaaaggcaatgcttaaaattgctcaaagaaggtgattgataaatactttttttaatatctgatgccagaaaaagacaggcctgtggttaatctcaatgccacttaagtttgctttggattggatttgtagtgctgcgactgaggatttgcatgagagaaaatagccaaactatacttagcagtaacaccccaatctgcagcacatttgtagtaagctataaatttagattgtgacaattcctgtttaatataaccatgagggaggcagacatttaggatgtagtcccttgaccgggagccaaaagtttcttagaccctaaggaactttagtgctttaatgaatgaacactgtttaacagcaagaaaaacttgtataaaaattaactgttactgtttgctatagtttgtgtcagtccaaatgtgtatacatttaagcttgaaattgtttctcctgggtttttgtttgtttgtttgttgtttgttgttttttgtttttgttttttttttttttttgagttcatgaagattttattggaaaaatactgtttctaaaactagaaaccgagtaacgttttcagtttggaacttaatggttttgttaaatattttactttgactaaaaccggtattcacctgtaatttttttttctttcttttttttttgtaattgaaaagattggcaattacagggatgctgaagagagagcaagaggggagttgtgagttcttattgacagtgttcttaagcctttcagaatctctgagttacctctttatttttaatgccagaatattcattattttccatatttaaaatatagtataatctagtgataagtgttaataagcatatgtgggcttttaatttagatataaagaatagcattagagatgagattaaatctaagcaaaggtgctcaagattcgtaagtaaaatggtacgatttgtggagcagcattcaggaagacctaggtaaatggagatcagccacattcttgaagtgaatatatcctggttataaagatgttaattcttaccaaattgattggagattgagtggaatttgctggttatcttgggtagaactgataaacttgctttaaaattaatatgaagaatctgaggcaggaagaattagctacatagggagtatcaggtcagtcagaggtacacagtaagaccttctatccagaaaaccaaacagaaaaaaaagagtttaaaaattccaagaggcaggccaaaaactgctagtaaaatattctctcggatacaaagattgaatgcagagcagtagcgatgatcagttgagatgtactaagggtttaatgggtaacctgaaactgttagtcacgaagaagaaaatgagcatctctctgatcctgctgcagcagagcgttctttttctcacactccctctttcccttgcccctgtactttttgtctttcctttgaaaaaacaaacaaacaaacaaaaaaaaaacaaaaagataaatttaggtttatgtaaagaatttgtgtttaaaaaataccatgggagaagagactggagagagcgcccagtagttagagtgggtattgctcatgtagaagatctggcacatcaggtggttcacagctgcttttagttccagttcctgcagacctgacacactctggcctccatgggcacctatgtgtgcacgatgcacataaacccacatgcacataaataagaagaaactaagtattgaaaaaataccagtggcttggtaagaagatggctcagagagcaaggactcttgctgtagagatgaactgctttcagtctctgggttccacatggtggaaagagaaggatgcttgtaggtggttctcttttgtcaagcaccagccctcctctgaaaaatactgtaatttaaaatactactggcagaatgtaaagagaagccacagtatgagagttgatttataaaactgacaaaagaatagtgctcaagacataaaaagatttattcaaatgcagactgatgtaatgaccaagggcgcgagctatttctcagagagctgcctcctgccagcattaaatgttgacactaaaccaagacccagcaagtgcgcttccatttctcttcaggttccagcccttgaccaaggaagtcttcagtagactcctaatgccttgctttccttcaggctgggacatcggaagttacagctaacatgtcactttggagagactagtgttgtggttatgtggctgacagaatgcctttcctgtcatacccatgcagaactgcagtcctgcatcatgggagcagagcaaacactccaaagaaagtacattgtgtcccttagaaatgtgccaaggatgtggagtgcattagccaggttagcaggatatatataacagcagtgccccaggtgccgcaagggtgggtagtgtaagcactgtgacagtggggaccccaggtgccgcaggggtggatagtgtaagcactgtgacagtggggaccccaggtgccgcaggggtgggtagtgtaagcactgtgacagtggggaccccaggtgccgcaggggtgggtagtgtaagcactgtgacagtggggaccgaggtgccacaggggtgggtagtgtaagcactgtgacagtggggaccccaggtgccgcaggggtggatagtgtaagcactgtgacagtggggaccgaggtaagactgcaggactgaagatccagaatggaaagaagggagcttgcctgatgtgagactggggttccaccactatggggagaagtagatgcacagacagagataaaggctctgaggagtctgatggagagacatgtggcaggctgcacacaattagaaggctgacaggactcgtgcaagatgaccaggcagtcattttaagatgtgaggaaagggtggcccctagacgctgaaagcagatggaggatatgtgtttggcttgggatggtgtctcaggtgtccccctgtcattggtttaattgaatattgagtttggggtacctttgtgacattcagagaggaaatatagctaaagatagagaaggctggtttagaaatgagaagggaggtccagttggggagataagattgcatcatgggctcagaacctgggtctgactcaggtctcaggaaatgtcagagtcggttcctgaccattttaagtagaagatgcttacctgcagagagaggggagcagctgcagagctggtggctctaaagcgtgtccaaggaaggcaggccactcactgtaaagggaaagtatcccgagggcagccttggtggccaacttggagtgacatgctcctgctttgtgaaacatgtttataatcattacttgaagtaggatggtggtggtggtgttttgttttgtcttgttattcaaaaaaagtagttgaaattttaagccttgattcttgttgtgtactggctctttcattcagtattgtcataaggttggggatgtcgctctgctttttcaggggggtcctttccttgcctagttgttgcttatcagtgcatctggagctctgcagcgctatgtgctctcgttgtttactgtgatttaggtgtcaggggctcagttttgaaggtaattctgtggtgtggagattgctgagtggcaccaaggacagtctaacttttgatcttaaaaatcctcttgttgagagtgtggccaggcagctcggtccgagcagggctttccttgccagtggattgtggggagtgcatagccagtctcttgtcctctgttcgacatggcatcttctgatgctcaagtgaaagagctggagaagtgtgcttcggccaggcttttgagctgattctcagcccttggtnnnnnnnnnnnnnnnnnnnnnnnnnnnnnnnnnnnnnnnnnnnnnnttccccacccatcccaccccccaaagaagaaggatcttcccctggagggaatccagaagaaattagaagctgcagaagatgcaagtctcacgaagcggaagtcttgaagcagcttgctgagaagcgggagcatgaaaaagaagtgttatagaaagccattgaggagaacaacaacttcagcaaagtgacggggagaaaggacacacaaaatggagactaacaaagaaagccggggatggggtggctgctgagctggggcatttgcgagagaaggacaagcgcggtgaggaggtgcggaagaacaaagaatccaaagaccccgtggacaagaccaaggctaccttgttccaagagctgactttctccccgaccccttcctaaatacatatccagagactgtactggccagtgccatttactttccctcctgacagatagtctagaagccgacctataggtagatccagaccgtgagatgttttaggggctcaaggggagaaactggaagtgttttactcttttttaaagtgttggtctttgtaacgtagctatttttctcgttgcatcttttccactcgggcacattcggtatggtgggttaatggctagtactatattgactgtgaaagacgtttgtgaagagtatgtagtggcttcttctaacccattagatgttgaatatctgttcactttgcaatcccaattctgtcccaatctcaccagatgctacagtacttcagtggctaataaactgcatagtgctgtggaaaaaaaaatccccttctcagaaaatgtattaatattattccattgccttataggatcaagaagttacactgaaaagtgtatctgattttgtttatagagtgttattttacttgattgattgattgattgattgattgattgaataaatgaatggatggatggatggatgggtgaatgaactatactttatcagtagcattttgggcttatgtttgaagcctgctctgccctccaaacccttgtattactcagtgattctgtatggtgagtggaagaactcagggtgtctcttgatttcttaactttttcatacgttgttaccttgtaatttgcccttcacttttgtctgttaaaataacctgcttatgatttaactggataatcacagttttccttaaaccttgaaaactggttcttttatcatctgttcatcacagtagtagcctcttcacagggacttgcttcacagttccctcttcatagtgagatatgtgtagccatatattgaatataaagaaaggtgtccttgtgttaactctttttataacatttcctcttctcttttgtccaggtttaactatagatcaacacatcatcttgcatctcatggattctatgagtttctaaattggtttgatgaaagagcatggtacccactgggaagaatagtgggtggcaccgtaagtatattccttacctttgcggtaactgtaaactgtggagtaaagcatttcctgctaagggacgagggtcttggaaggccgtcattagttcacagacacatcttccatggctaattagccagtgtttctcagctccgctcttggcagtttatttgtaggatatcttacactgccccccatttctgattgaggtcaggggctggattaagaatctgctgtcacaaagtacctcaagtccagagtgcttttcgctttgtttctgaacaattgagtttaaaagcttttgggggaaggaaataaaaattttgaaaatcaaattaattaaatgtttccagcctcaagcctctgaattaatgtagataattgaaccgtattgagtagggtagagtgttctgcctccagaaggatgacatgaaggttcttagggttcagtgtgtaaggagaactcctagagaagggggaagatgtggcaggcagctctcggagaagtttgtacactttcgtttcttcttgaattttgatgctacaggtttatcagcatcactcctcataagtgtctgcttgcgctctctctctctccctctctctctctctctcattagttcagattcattcattttttctaaatccttgagtttatttttatgctcccctcccagctgcctgtgctgttggtcgtaacgttgagcctctgtccactgtaggctgtgtttctggtggtcattgctatgttgtcagcagcactccctgagtctggtggtgttttcattatccttcctttcatgttaatctgttagggtctgcttcatctgggggcttttggtttcttttatgcttattctgtagcccacgctagcctcgcattcaacagtaacccttctgcctcagcctcccgagtgatggaatactaggtgcaagccaccatgcctgcctaaaattgcatttagcctgtaaacgaggagggctttgtagtgcttttttaaattttcaaatgtatcatagttaagaaatatctataacttcaggccttttatttttccatacttgattataaccttaatgcattctaatttatttactccatactccttccttctgtgtttagaaagagtggtgcatgtgtgtgtgcacatatattcacatgtgggtgcacatgtacatgtggagacgaaaagtcagccacagatgttccctgggtgctgtcctccttgggtttgttgttgttggagcagaggctctcactggcctggaactctctagttgggccaggttgattgctcagcaaactccaggaatctccctgcctctgcccaccatgccattccccatctcccagcactgcactataagcaagtgccaatagtccatgatttatgtgcagcttgggggtgaagccaggtcttcatctgagctgtctctgccgctccagtctggggattcttatactcactctaacattactgtagttttggaacaatcttacctctgtgggactttgttcctacttaggaaggcagagttccttcctgacttccctgatgaatgagaagaaattgtccagtttagtttcataacaggatctgactttgctgggaactaggccttttctctgactcctgtgccaaggtaaaaccactgaacctctggctacaaggcacatattaacacctggtttcttgggcttttttgctttctctttcttgtggattctagtaatatgaatgcctacttaatttgaactcccttgtttttttacatctgaagagtattctttttttcccttaaagtttaaataagtatgtattcaatcttaaacttatgagtacatgcatgcgtagggcctacagaaccacgggggccataggaactggggttgtgagtagttgtgtactaacatgtaggtgctgggaactgaacccgagtcctctgtgagagcagcaagtactcttagccagctgagccgtctctccagctccgagtttgaacatatctgtgctgttgggaggctttggttttagtcctttgacccagtagtactttgtattttgaaggttttcttacattagttccatctgccatctaatggatatgttgacttatattgagaagcacttcaggtttgtgtctattttctttctgtactgcagacagaatcatacagtagtaagacgtattgaatatgaaatggaacaaaatgttgtaagaattataatgacttcccatgctggtcttctcaacctgaatcctattctgtgcgttcactggacgctgaatatccactctacacctgtattgtcactgatgctgagaaatgcagttatttttctggggcttatattcttgtgaagttgagcagttaaaaataagatttataaagtgtgttcaatgctagtaaatgtaataaatgtcagggagagaaagcaagggggtgagttaaagccacgggctaggagggcatgagacacacagattcaagtggggcagtcagcgagtgagagtaccatgttgttaccttcgtgcctctggtcttgagagcaagagcctttggggatgcaaatgcagggttaaacagtttggtaactgaggaatacctgggaataaataccctgggtaccaaatcttcttgtgtttgtttcttttgttgtcagggtgggtgtgccaggatagtagtctcccctcccatccctgatacttgaaacagtgctttaagcctcttagtctttttttgttgttgtttccaaatgactagtccttcttagctagaggtatttactttctgaatctcagattgaaaattgggggagactaacttatattcatcatttctcttttttatatatacacaataagaactaggatgataaaaacgctactccttaaaataaatgactggggcagttctcagaactgagaaagataattaataaagatgattgcatattcttattttaatattttaaatattaaatattaaaaaatagaatatcttattcttggtttatattctctctgttcttttaagtgtatttcttataaatttgatctttgtatctattacaaaaagattttattttgtatcatgtaaaaattttccgttcactcttaactacaaatgatgtatactaatacaaatggaagaagttgtgtgttttgtgtgtgtgtatgtgtccccactttgttcactatgtaactaaattccctttttcccccctctctaggtttacccagggttgatgataacagctggccttattcattggattttaaatacattgaacataacagttcacataagagatgtgtgtgtattccttgcaccaacttttagcggccttacatccatatctacgttcctgctaactagagaactgtggaaccaaggagcaggacttctagctgcttgcttcattgctatcgtaccagggtacatatctcggtcagtggcgggatcctttgataatgaaggcattgccatttttgcgcttcagttcacttactacttatgggtaagtaccaggtaatgttagccgccttaaatgctggtgaccttctgccctaaggctttagggcacacatgcgttctttaccaataaagtttcacacagatctgttactactcatagtacatttaacaaaagttaccatttaaaaagcatacaagccaagtatatcaataactgtattaatatgtctatgtaaattttaattttcaccaccttattgtatctactttataatcatagcttaaaaaaaaaaaagctaatcccagcacttgggaggcagaggcagacagatttctgagtttgaggacagccagggctacaccgagaaaccctgtctcggagaaaaggaaaaaaaaaaagctaccaggagcagcctgtcaactatgcacaccttttatgtgaacactttttatacatttaactatattttaaattctcttaaaagctacctggcttgtgggtattttttgctttgacctggcctgaaattccaggaagagtgctgcggagtgatctatagagaaggcctctcttgatctcaagtttgaaagagagaaagcacccatatgagtgagtttgacattaggacactcaagagtactgccatcgtcatcagaaagtgtctttaaggactcttcgcagcctacaaagggggggtggggtgggcaggaagggacagactaaaacaccacacctaaacacaaaattttgtaaactatttaaatgtaagttttcgtataaaaataatacatgtaaatgtgagtagatcttgttaatatgatgccagtgggaaactttgtgagtgaatagtcgtgataaattatgaatatgaaatttaaatgatgcaaattagacacttgcagtttgtagcaaaattacaacaatgaggaatgtgcctctgctccatagggtgtgtaggtggccctgaggagacagaagtcagtaaaggagaggcggcctgggtggcttcagttcctttttaaattaaattatttgaagaaaacagtggcattgatttcagtttggaagtttggatggatacattggttaactgtttcagccacttacattctgttactacttctcatgtttgctaaaaataccctattatgggaaacttgtacaacagaaaagtgaaggtacaaagtcacttagaaataactcactcacagtgggcatttacaaacagattatagttttctagccccttgtgttgctgtatacttttgtaacaaggttttgatatgtgtatggaagtgtctgagactggcctaaagtccttgcctgtgcctctgcctcccaagtgctaggatcatagttacgtgctattcctggcttccgtttacttttttatcttcattttcttccagctggtgggtgtgaactgttgaagtagtagtgtgctaactgaagtctcagctaccttttaatatttaaatttttttctaagattttaataaaattcatttgtgttgttttaaagagtacacttaattcttactgcattcagtgttgtgcagctggcattgctgttacagacattttttcagtctaaaagttgtgcttggacctcaaccctgccctcgtcagtacctcctcttccctgctgtgtgggagccatgcacctgcaccggaaagttccaatgtcgtgctgctcttggatgacgctgtctggaggcttgtgtgctgggcccacatgtagaggccaaagggcaagtttgtaaaattggttctctcttcccaccttacagaggttctaaaacctaactcagatcagccagcttgcaaggcgagcactttttaaccctgagacctctctctgagccatcggactaggcttatcttttattgacttacctagtctgaacactcgacttaaatgaaatcttacaacataggacgtgtagtgtcttggtttttgtgtttagcataattgttacacacatatctactttatttttttcctccagcttttttcattatggtaaaatacacagactataacatgtaccaagtgtcatggtttagaaatgttgtctatccttgtaatgttttgtggccattcataagacccactcacgtcctgtaaaatgcaaccgtgctaccttttgtctcattgtctttggctaattaaataggtagagacctgccgtatacacttgtataaataacagttaatcttttagtcttttgtggacctctgtgccactttccataactgccatttccagtttctaccagtggcgagcagaggagtcttctgactgcatgtgttcaccagctcttgctctttgatggctgtttcttattctgggcctaggctggcctcaaatctcactattcctgctgcagcctcccagatagccggggttccatgcataccttcatacctggcttggtttctctggtgctagtattgatgctaataataggtgtaaggctgtgtgactggttctgttttgcatttcctcagtgatgagtgggaagcactttgtgtgtcttatagctagttgggtaatttttttgtagaaatgccttttaaagtccctttctcatatttgagttgagttttagtagttctctatgtatgcttgctactaatcctttatggattatctatttctatgtggttctcccatcttatggtctgcctttttaccccatgaacatattttgatatataaaaatcaatgttcatgaagttcaacttgtcaacattgtcttttgttcctattatccaggaaatcactgtaaaacatcactgtgagctcttgccctatgtcttcgtttaaaaatttaatagttgtgctgggcggtggtggtacacgcctttaatccccacacttgggaggcagaggaaggcgaatttctgaattcaaggccaccctggtctacagagtgagttccaggacagccagggctacacagagaaaccctatcttgaaaaaccaaaccaaaaaaaaataataataataatttcatagttgttttaaggtttatattgaggttgctccatttattattttataaatgatacttaaacaaaggtccaaatgtattaatttgcatactgacttcttttttattggatattttatttatttacatttcaaatgttgtccccctttccagtttttcctccacaaacccccatcccatgttccccctccccccacccacctctgggctgctctcccacgcacctacccattcctgtctcactgccctagcatccccctgtgctggggtaccaattctccacaggaccaagggcctctacttcgtacgcagctggagccatgtgtactttttgattgttatgttgatttctatttccccctttgattgatcttggtaccttgtcagagttatttgaacacacatgccaaggttacctagagtggaaggtgtgtttgtccttgtgccagcacccactgtttgacctaccggaacttcgtagtacattttgaaattgggaaatatgggttccctggcttggctcttattcataatcgtaattgtttaatattcttaaattttcaatcactttaaaatatccatcccttttaaaatccaaactcgttttacaattaaaagtctcttaactgtgggctccactaaaacagtttcttccttcaagagggaaaatatcagggcacagtcacaatcaaagcaaaaatcaatctccaaccgtccaatgtctgggatctaactcacgatcttctgggctcctccaagggcttgggtcacttctccagccatgccccttgtagcacacgcgtagtcctctaggctccagatgcctgtacttcactgctgctgctgctcttggtggtcatctcatggtactggcatctccaaaacactgcatgaccccttcagtcctgggccttcaactgcaactgaggctgcactttcaccaatggccttccatggcctctcacagtgccgagcctcagctgctctgcgtgaccccttcatgccttcaaaaccagtaccacctgggtgacccttacatattaccaagtcccgctgcagcaggagtacaaccttggctatctctggaacacagcctctgtgctttcagaaaacacttcccagaagatgtcacctcaatgatgctggtctcttcttaatcaccgctaatttcttagctccagctaaccagcatcaatagtcccagtaatgccaagtttttgctttagtagttctggtatcttgttaatcacagctgattcttcagccccaacgaaccagaactacagaatcttcaaaatcaaaacagcaatggccatgaaaagagtctttaattttccccctgaaatttcacaaaccagaccttcattttctgcactgttgtcaacattatcttccaagctcctacacaacatctgacagagctcttaacaccgaatcgatcttctggcccaaagttccaaagtccttcctcggtcctccccaaaacatggtcaggttgtcacaggaataccccactctgctggtaccaatttgccttagtcagggtttctattcctgggcaaaacatcatgaccaagaagcaagttggagaggaaagggtttattcagcttacacttccatgctgctgttcatcaccaaaggaagtcaggactggaactcaagcaggtcagggagcaggagctgatgcagaggccgtggagggatgagcttcccttgttggcgcatagctgtcataggacacacgttccatgtaatggacattcttaggtattggtcatgtctcttgtaatcaacttatacattactttcctttgtttgctaaagatttcctaagattttaaacataccaaggtcattttatctgccttctccccaggtcaaagtggctgttgtgccttttgctctccagtgtgtatatttactcttccttcctgtttgtactgcctagaatctaagttcagtgttgaacatcagaagcaagcttccacgtgctctgacttaagtggaagcacagagaagcacccgcccatgcgatgattgtagctgagggccactgggcttcattatagtttaagaaatctttccttggtgttcagcttagcagttcatggttagactctgttttctgtccctgtttaaggttgatcacattgttttgacctttgctacagtcatgttttttatcctctgcatcattaatattttggttgaattaattttgctgtgtcatgtattatatttgataaattatctacctttatatactctaggtcttcctgttatgacaaccaaatgtgtctctagacattgccaaatgttcctcaaggttcagaattaccccagcaagagctcactgggctagggggtttttgtttgtttgtttgttttcctttttttgcttcagatgttacaatagttttgtttcatgagataaatatttgctagaagtgcatactgctgtgtttatattatgtgtattttgttaggagttttatatctacattggtgggaaagactggatcgtagttttcttgtattgtttttgtctgattttgatatcaggtttgcaggaggcttcacaaatgatctagggagtgttttcttcttggatgctctgaaaaagtttccatgaaatttccattgtctcttatgtaacatggaattcaccagtggaccttgaaagatttttaattgttgaatcagtttgggttttttttgttttgtttagtttttatgcatgttttatgcactgttgctgtcttcagacacacaccagaagagggcatcagatcccattacagatggctgtgagccaccatgtggttgctgggatttgaactcaggacctctggctggaagagccgtcagtgctcttaactgctggggcttctctccaatcccaagctgaatccattttctaatgttattgttctgatctgatttttctcttcatgagtaattagtaatgtgtgtccactttgaaccatttgtatttcatatcaattgtgtgctttgttggcacaagttaattcctgtgtagtctgtaatgatgtctcatttctgcttttaatattttgtatcctccctttctagttgattagcctggctaaggtttatctatctagcttctgggctaattccctcccccaattacattgatttcttctcattcggaaaaagattactggactctggagaagctttaattaaattcaaacgcttcatctctaaagactaaagttgtactttgctcatctgtcctaaccaagtctgccttttgtttggtgaactcacacttagcaccatttattctgtgattctatttatatttgtaatatagcatctttctatctctaatgtatatttttaaatcttagttgttcagttttttttaaaaatctttcctgtgtatagtggttcctgtgcatcttgagtacagtctgcctcaagctgttaagataattgtagtacattttagcagtgtggctccattgtttttctcttattccattatcatcatatatgtgtatgtatcactctcctaaaaaagtccagataataattatattgtatgcatgtatacacatatgcatatacacacatacatatttatagttgattgcttttgttctgctatgatgggtctcaggtagctcaggctggccttaaatttgctgtaaggctgaggttggagtgctggaattacaggcctatataccacaccgagcggcctgtcttcatgatagtttcttagggctactcctttggtttttttatcagagatcagttaataagcattttcccctatggttattttccttactcctcttcttcagaatctcaatatctatctctctctctctctctctcccttccccctctcccccctgcctgnnnnnnnnnnnnnnnnnnnnnnnnnnnnnnnnnnnnnnnnnnnnnnnnnnnnnnnnnnnnnntctccccccctcccccctctgtctctccctccctctctctctccccttctcccccctctgtctctccctccctctctttctctccctctcccctctgtctgtctgtctgtatctatctatctatctatctctctctctctctctctctctctcccccttccttccttccttttctttctttctttttttttttttttgtgtgtgtgtatttttcagtcctttgactgttgtctaatttggttttcttttatttgttatatttgttggcttattggggttcatggctctgtagattgtccaacataaactttgaacagttgtgatttaaaatgggtgccctaccccatctcttcaaagtctctttgctttctggagttttctgtgtgttctttggaatgtttttttattgctcatttatgcttgtactctcaaattctagttgcttctagttttttatttcatgagtacaaaaatgtacatatttcacttcattattgaagctccctattgtaacaaaacaaaagccaaagcgtttctctctgtagctctgtcctggatctcactctttagacccaggtggccttgaactcacagagatctagagcctctgcttcccaagtgctggaattaaggtagtttgtgatatagctgactggagtctgtgtcctctaaatccagcaccttagtccatcctaatcaagtttctgctgactgctttctttctccccgaacatggctccatccttagactcctggtgaaatagcattacagggagtgctaaaactttggattttgtttcatttttctgagctatgctggattgttaaaccagaactaaagctggcaactctgtggtgttttagagcagtgtatctactgttatttttatttctaacctttctaattcaatttagcttcttaaagatcactgtctgcataaatatatgtcagccaaggatttgggtggagtttatgttcaagtattagcacagagttgattagtctggggtgtgatgagtaccttcaaagtttcaactgattcttctgatagttttccaagcctgtgtgtctgtgtgtgtgtgtgtgtgtgtgtgtgtgtgtgtgtgtgtgtgtgtaatacacttatctcagactgttctcagggcattatcatccagagttgtgtcattggtccctggcaagtctgcctgtcttaactattcatgtaactttaggtggcagagtggtagatggcgtcatgtgtttggagtttgtcaagttcatggtgaccgtctgtccatctgtctgtcccactggttatgtatactgtacactgttatgctgctcccattgccttacagggccatcctgggctgtcctctgctttcttgcccgttttattctccaggcactttttggcttttgggaaaggatcctctgtgtgacaccccgtctcgtctccctggtgtccgctgctcttcctggcagggcatttgtatctgttactttagtctttttagcgctacagggtttgtaatgacatttcccctcaatcacccctcaaatagattatctcaggctggcttttcaatagccatcattttaataactgtccccctgttctcattgagagcaatgaactaggaaggctttctctcctctccctccccctccttgcttcttttcgttgtattcgttttcatattttgtaccaaagtctagatatcacctggagttaactacactgtattattaaaaaacctgtttttaaaaagactttctggaagtttacttaggtttgttgaacatgcctcttagcacaaagacagaaaacttttgaatatagacttctttgtgataggaacagttcttatcttttcttggatattcattttaaaggcaaccatttgctgtgtgtctgggtctgtgtcacttattttgaagatgctaataatttgcttttttaggtcacaaactcatttggaaattgctaccttaagacaagattggttggactttgatttatttgtatgtagcctttctaatataggttactgaggatttacttatgtattaggccctctggaagacaattcaacaatatacattttaaaatgttgattatgataataaaactttcttattgtaagtttttcaaaatggaaacttaaatcatatatatgatcctgaattcagatgaaaaaacatataagcctagcagattaactatatgaaaatgtagatttactgaacacatttatttaaggctccagtttattgacattaaccatttcatggcagaaaatgaaaacaggaaattttcttatttgttctttttacttaaaactaaccaaaaggactaggttataaaatacatcttgttgagcactataaaggtatattttagtcagttggggtagccaagcctcagtcctcactcagccttttccattttacaatggcatttgcgtttgttgttgttaggtaaagtctgtgaagaccgggtctgtgttctggacaatgtgctgctgcttgtcatatttctacatggtaagacctgggcctgccttgcctgcctgcctgcctgcctgcctgcctgcctgccgtgtgtgtgtgtgtgtgtgtgtgtgtgtgtgtgtgtgtgtgtgtgtgtgtgtgttcttagaagttactttaagatatttttgtatgctaatgtatgtcctcatcagttgatttgataaccaatgaatctttaaccttctaactaaattagaacaagctgattctgaaagaccttgtctattttaaacatgaaagtcagtcccaaacactggtttttaagaatatttatttagacttaatatccgtggttactctgggttttttgtttgtttgtttgtttttgtttttaagattcatttatttattatatgtaagtacactgcagctgtcttcagacaatccagaagagggagtcagatcttgttacggatggttgtgagccaccatgtggttgatgggacccgaactccaaacctgcagtcgggtgctcttacctactgagccatctcaccagcccggttactctggttttaaaaatatatgattatatataatacaaatcaatgatgtgtgtgcgcgtgtgtgtggtctgtgtagtctgtgtgtgtgtgtgtgtgtgtgtgtgtgtgtgtgtgtgtgtgtgtgtgtgtgtgtgtggtcttacaatccgtgttacagcttcagccaatcagcactgtcaagagtcgcacagtgtggccaggggatgtgagtgcccctttagctgagtcactgaccagagtcagaatccctccttcttaagctaagtgaaccttctttcagaaaatagatcatcataaatagatggaatacacgcttgttgtttttgtctaaaaatttattgcttatattcatttccaggacagcctatttcttctagttcagttatgtgatgttcttagtcttcctgttaaatcaaatctaacttgagctattctccattgagtttagaaaagcttactagctttatgggatcatcagtaaaacagtccccccaaatcctagcattgtattttttctcatatttaggttgtcatgacaaatgagacacacttgttttaggaagtgagaggtaggagccatgagtctgagcctctcttttcccacaggtctctgcgtggggaggttatgtgttcatcatcaacctcatccctctccatgtgtttgtgttgctgctgatgcagaggtacagcaagagagtctacataggtaagtggctctgcctctaaaccgcgctcttagtaaacaactttgtttgctcagtaattgcccatgaaaaggcagtacattttttatgtttaacttgccttgtgttgattacatgacaccctgtcacaaataagcaaaaaacaaaaacaaaaaacaaaaacaaaacaaaaaacaaacagtgggtgggggcagggagattggcccaaaacaagcctcatgtgtttgttcacatgcagtaacatgtaaaaatagttaatttgtgtgactggttctgcattacctgtgcctgaatttatcaatgagctggcctggtccaaggtcttgcgggaggagtcagtgggtagaagcattatgtagtagaacattccttatagggatgtggttattaatgaaactgcagaggagcagagatgtgaaacctgtactgttttatcacaagaatttcacttacgttaatgagagcttggatataaaatgtcaaagttaaacatggtgtaggatttgtttctctcagtgagagacacgtcagctaaaactttacagagtgacttaaaataattatttcttggggctggagagagatagcttagcagttaacagcactgactgctcttccagcggaaggacccaggttcaattcccagcacacacatggcagctcacaactgtctgtaactccaagaactgacactctcacacaaacatacatgcagacaaaacaccaatgcacataaaataaatactttttagaattaaaaaaaaatgtttctgtactacagtttttatttgcttttgaaatttacactggttatttgaggtgaggcgatttgttctgtaggtaacaggactttggtaaagcttattaattagaagccaagtatggttgtacatgtttgtagtctcagttctaagaggtaagagggtagcaagttcaaagccagccttaaatgtgtaagaaagttttgctaatttaaaaatagcttatattaaacacctcatattaatagcagtaattaccctaaatttgtgtggtaggcagagggcagacacaacatagatagtggtcaagggttctcataacagctttgaattttcttatgtaacatgtttgtaatacttattctgacactcctactttgattgtctaatagggtttttattaccatatactatttggaataatactttaatatttgtagcacaatttcctgattacatttgcttaaattatttaattactatcgtacgtagttttggtggatttgatccaaactattggaattaataaaaagatgtatgattttatatttgtgacaggtaaagatttaccaagataggagattgctcttgcatcctataaactagatacattattttgcatgattgggttacttataaaagcataaagtagtttccatgctagattgatccttttagagacgatgatctgttttgagttttaccttcaggctgtatgaaccgggccgacggcagtgctgaaaggcatttgtcttggcctctctcttgcttgcaggtctttgtgttggttacagtaaatgctttctaggggagcaaggagcactcactccctgaacggaggtctagcagcatctttctgtcttaagactaaaaatagtagagccagggcctttcttactattactcaacaggaatctttgatcaaaagccttcttcaattaatacagacagagattttttccatacctacaaacaaaagtggaatatggctttggtgctgtcataggtgagcccagtcttagaatcgtccctgtcaacttgttcaggagcacttctgtgtagaagttaggagactacatgagatgcttaggtctgtctaaaagcctgctcacttaaaatctaatacttgggaggctggggcaaggggatacccagagtttgatgtcaaccttgatcacagtgaatttcaggctagcctggggtaaagaattgcgaccttccctaaacgaataggaaagtcctaaattatttttagtggaataaatttgcaattttgtttaaattcttttaaatctgttttatttgtaaattaatgtttgctaatatttgtctgttgtactttttgacacatactaggtaggtacagttcctgcatagttgcaggagtgattgagtcacagtatctcattttttaaaagcagaattagccaggaagggctacctttaatcccaacaatctagaggcagaaacaggcggatctctgggctgaggcttgccagggctacatagtgagactatcatctcaggtggaaaggggagttgggtttcctgagttctcccttatgtgttcacactcctgtgtgctcttttttttttttttttaaaagatttatttattattatatgtaagtacactgtagctgtcttcagacacaccagaagagggagtcagatcttgttacggatggttgtgagccaccatgtggttgctgggatttgaactctggaccttcggaagagcagtcgggtgctcttacccactgagacatctcaccagccccctcctgtgtgctcttactctcctgtgttctgatgctgtctcactagcatttgtcagaactgatgaattgcttctgtaagacagaagtagaatttgaaacttatttttatattgcacatacctattttgttttgactgcatgtatgtgtgcaccacgtgcatgcatgcctttgtgcctgctgaggtcagaagagggcatccgatcccctggaaccccagttgtaagccatcatgtgggtgttaggaattgaacccaggtcatctggaagatccaagccaactgactggatcttaactgctgatccagcccagaactagagctttaaatctgggtgcatttcctctaggttctcatcctccagattctcacccttagtctcctactggctagtagcagaaggttccttccttccttccttccttccttccttccttccttccttccttccttccttccttccttccttccttcttttttttttgtttgtttgtttgtttctttgtctgtttgtttttttgcttctttgtctgtttgtttttttgtttttcgagacagggtttctctgtgtagccctggctgtcctggaactcactttgtagaccaggctggcctcgaactcacaaatccacctgcctctgcctcccaagtgctgggattaaaggtgtgcaccaccacgcccagcagcagacttaactttcagcttgcctttctgccttccgtcctttctgtcgtgctggctgccttccttcctccctgagccccttgtctttttccatcctccttttgatttgatgttctaatttctactaagttttcaatcatgtatattgtatattaggaaggtaaaatggatttttgggttgttttgttttggaaagtagggattcctgccactgcccagcaatactctgtttccattggaaagtgtgataatcttgctcgagtagtttgaggaagtcatatcttcctgcctttacaaatgtggaccttgtaaaatgtctgtgtcagtgacatgctctacctggtcgctatgagcagtgtccctgggaagaagagtgtatatctgtgcctgtgcgcacacccagctgtcctgctagtcggaagagcctatttcctgcctctgttgctcttgctgctctccccagtctttacccgtttgccaaaactctcggtagccagagtgctcacaaagtagcaaggtggctttactaagtaaacttttcaaccttcttacaaactttaatattgtttgatagcagtcaggtggaactgattggattgtaaggtctttctcctctgtatcttgtctaacagaagagggatattttgttagctgttcctattagacactgaccaagagatgaagtaacttacaagggctggtgggccctatggtgggttaatgtaagtggatttgtgtgttcacagacccttctcttaagtttgcagaaagaagagtagtagtagcttaaaactccagagacgtgggcagaggaaaaggtgacaggcactgtgtgaggccctgactggaacacatttgaagcagccatggtagctccataattcaatcactagggtatgcaacagccaagaaagacctgtctcaaggaggaagggagacctctaggttgtcctctgacctccacatcatgccctgacactccagaataaaagatggcccagagagtgctgccgagttgtaatggcttctcagggaggtgtggaagtgagcgcagcactcttatcaacctacggtttcagtggacctggagcccagtgtggcattggccacaggttcactagctgccatgccactgccactcaatattctgaggaaaaacaagattaggatttctatcgatttctctctaaacagagtaaaactaaattgtacatgtgaataagcccagttgttttagggggcatttttctaaccaggagcatagtctgcagcagtgaatgccaggaactgtgtttccacaggatggcagtgtggtagcacttttatgatgtaatgagtgatttacggtatcgttgggttgtgctctttcttagagctcacttctttgatggaatagtgtaagagtcgagaaataggttagtgtggctgcatagaaagttgggctggctggggttgtggtttggtaatggctcctggtggagtttgaggaaggagcggtgctgcgggtgtactgctgaggtcctgtgaggacggtgtgtgccttttatgctgctgctcctgctcctgcttggagaagcctcctcctcccgctgtcacggtgtagccagacgtgctgtgctctccctgctcctcagacggacttagaggccagcttggattgctcttaccaggattctctgttttgaaaatgtcccgattgtcatagatataaggtctttctgaaagtacactatttggtactgtcatataatctggagggaaaagtactttatttttacagtggatagaggtgtttcttcttcatcttcaggtctttctactcatgtgaatctaattttccactttttatgttttaagttttttaaagtttgtgagatttaaattagatattgagttatgtgtgctattttataaatttaggaagcacagtatcttacgtgaggtaaatgtgactgtggagcttggctagcagtcacaatcttgatttggtacaagtggtttcctgtgtattgaagggctctgtgagtcggatatgtatttctcctgtgtaaacacttgacagcatccagtgatccacagctatcaatcagctcaggctactgtgggtccagctcctttacacagaactctgggtccgtgcagggtcctgcagagtggcttcactggctcaggtgaaaggaggaggctggtgcacaggcctttccagctgtcatgtccgtttctgttactttgtttgacataagccaaacaataagaacttaccctttccttgaattcatttttgatactcttcctattaacgtggcctctagtgctttgtttccatagagacttgttattggttgctttgatatttcgtgtcctgaagagtacctagagccttaggcactgtagacaagcgcctcactgctgagccactccccagccctggtattgcttctccttaccaatgataagaactcatgtctgaagtccgtgggaagcagccgtgtggaggaggaagttggggtgttttctctggggtggtcatatgcttgttcgttgtaaggtagtttttttgtttgtttgttttttgtttttttaagatttatttatttattatatgtaagtacactgtagctgtcttcagacacaccagaagagggagtcagatctcattacagatggttgtgagccaccatgtggttactgggatttgaactctggaccttcagaagagcagttgggtgctcttacccactgagccatctcaccagctccgtaaggtagttttactgcctcattttctccttggctttttaaaaaggggaatagtttattgtttttaaattgagtttgtattgtctattatattcagcccaaatcctgtgagtgctgctgagttccgtgtttatttcttggaggcagccccagcctgaggtgattttgcagtgtttggtgtgtgcaggcctcactgaggaaaaactgcactcttcacagtctttgctagtagtgtctctgtgttcctggctgggggtgggtttctgagttccacactgtaagatgcatagtgagcacagtgggtttgcggctctgatgtggggaggaggccgcagaccccatccagctctcgctctgtgctaatggaactgaagaatttgattttgtatatttggggatcacatggtaaccttgttccctccctccctctgctcccccccccccaattctgcttctgactcttatcagggcttcaacacagattaattaataaaagaaacttactagaaggccccttgaccacataagcagattaaaaattgtgataacttggattttatttgaatatttcacaaaggggcataccactgcggcatcagtgcgtctgcagagttcactttgagtggctggcagaactgtggccttcattagttctgagtttttgaaaactctccccacaagctctggccctttctattgtatgtatgagcttatcttcccaacacagtagttataacttagcagacagtttgggaagcagtgtagcatttgaactaatggttcacaatttcccttctaaaaattagtttcttttaaaagcagataaatacaactctaaaggcaaggaggagggaagcatatgctctgtgctgtgttgtgacgagtatagcaggcagagaacacacagtagcatcttctatttcgaaggtatcctagacttccctttttatagtgacttatttacccaaaactgaacatcaagtacatttatgaaaatgatgtatataaattttatgaatagaatactatttccacatcagcttattttagataaaccttttctcttctgataaaattttagtttcagtcactcctaatactttctctcttgtcagatgacctaatcttgatctgtagccatgagtggaaaaccagtctttgacacagattgccactgcgctacagcagcggtgtgctttaggatcagtgtgagctaggagggtactatggagagcaaacagtctttctgttagactgacttccgtgactggcaggttcttttcctttttaaacacttcagcttctacctgagaagtcttaggaaactgcatagaaggcacaaaatactccgagcttctgagactagtaggcacacatgattggtggcaggtgtttgtgaggccgtgaatattttggattaataacacagcaatggtagttacttaatgcaagtgcagttgcagaatttcttggctcttatcaatgattactaatggtgacgttttagaaatgtgattccatttatttgctcgaaaggtagcacgagtctctgaaattgtgagtgaggtctacaaacaatacttttaaaaatagatagaatatttatggtctataatgcaactaacattcatatatcaaatccacttcaagattctattgtttaagttctgttaacttttctaaaaagatttttaaatatatttatgtgttgagtatttaatggcagtagtaaattacccttgtttcctgttttgtttttatagcatatagcactttctacattgtgggtttaatattatccatgcagataccttttgtgggatttcagccaatcagaacaagcgagcacatggcagctgcaggtatggaaactagtttgaagttgagatgaaaggacattgtaaatgttttatccacttaagatgtatgtgtgaccttaatcatttttccttctatactgatgttaaaatgaggtttcaggctctttattatatcataatttgtaagaggttttaataataatagatggtgtacttagctttctattgctgtgatgaaacactgactaaaacctactcgaggaggaaaggattcatgtgacttgagtatcctgctcacagtccatcactgagggaaatcacggcagaaactcaaggcaggaccatgaagcataggccacgtggggtgctgcttactggcttgctcccgaaggcttactcagcctgcttttttagacaacccaggacccccagcccaaggttggcacccaccatccatagtgagcttgtccctcccacatcagtcattaatcaaggagctactcccacacttttgtccgtcagccaatctgatctcattctctgttgtgcttccccttctcagataactctagcttctgtcaagctgacaaaacacaagccagcacaccagccagcacaggaagaagtataatgttttaaatctttgctgatgcatggtagtgtcagtgtgcacagttggctgctcttcttgtctggtgcatgtgtaaggattctgatcactttggaaaaagatgtgcagtaggatttttcaggtcatcaaatgtgggttagctgtcagttggcacagggaatattggtagatgagataactagtccctggggtgagggatacagaggttctacagctttgcaagtgaaagtattgaaatggcattagggaaatgctgtgatggtattcacgtgcgccttctctttaaccaggtgtctttgcgctgctgcaagcttacgcttttttgcagtatctgagagaccggttgacaaaacaggagttccagacccttttctttttgggtgtctcactagctgcaggcgctgtgttccttagtgtcatctatctgacatacacaggtaggtgccatcacctgtaagatggaagttgtggctctagattactgttcacgaatagttgttcacaggttcttctcacacactccgtatatcctaatatcaaatattgtataatgtcaaatgattatcaaaagttctaaactccattaacacattacaaactgcaattttaaaaaggcatgagctgccattcctgactttagaaaaaactagtttatcttaatattactgcttttcaggctcctgtaaatccacaaacatccttctcttgctggttaaagagccagaactattggaaactcagcatctgtgataagctatagttgctcaccctctgtgtgcactttcttccccctccttggagactgttggccacatcattccccatgctttggatctaaatgactccctaaccgtgagctcacaagtcttgaacagcagtccagtttccctggggtactccatatgcccagctgatggacaggcccagcactggatgaatggaggtgtgactggagtcaggaacctaggtgtttgaaaatacattggcatctataaaataaaaccaatattatttgaatgttgttttaaattattcatgattaatagtgacaaacctctaaaaggacaaattgggttggtgcaatggctcagaatcttcctctgacctctacatatgctccatggcttgcaaaacagacagacactaataatgataacaatgataatagttactatcatggcatgcactcaatacacaccaataataatgttattttctttatttgtgtgtgtgtgcatgctttgcccacatgtgtatgtactcagttctcacagacctcagaatgggatgtcagagcccctagaactagagttacaggcagttgagagctaccatgtgagtgctggaattcaaacctagatcctccggaagaatagtcagtgctcttcaccactgagttctctctccagccccaagctaagcatggtagcatacagctgcattcccagcgtttgagggggtgaggtaggagggttgttggatgtttgaggcaagctgtggtcgggtcgggctttatctcaaaacccccactcccagagagaaacagacataatttacaaaataataaaaaggcagataatttcctctgtgtttttcttttaaggttatattgcaccatggagtggcaggttttattcactatgggatactgggtaagttgaaatatgctactttggcctcctattcaaaagcctttacttccatgcgttcctatattgtgaggacttcagtcattacttaagcaatattaaatacccaggccgagctgtttgaagtgaatgcnnnnnnnnnnnnnnnnnnnntttattttaaaggcaactatttgctgtggtctgggtctgtgtcacttattttgaagatgctaataatttgcttttttaggtcacaaactcatttggaaattactaccttaagacaagattggttggactttgatttatttgtatgtagcctttctaatataggttactgaggatttacttatgtattaggccctctggaagacaattcaacaatatacattttaaaatgttgattatgataataaaactttcttattgtaagtttttcaaaatggaaacttaaatcatatatatgatcctgaattcagatgaaaaaacatataagcctagcagattaactatatgaaaatgtagatttactgaacacatttatttaaggctccagtttattgacattaaccatttcatggcagaaaatgaaaacaggtaatttttctttatttgttctttttacttaaaactaaccaaaaggactaggttataaaatacatcttgttgagcactataaaggtatattttagtcagttggggtagccaagcctcagtcctcactcagccttttccattttacaatggcatttgcgtttgttgttgttaggtaaagtctgtgaagaccgggtctgtgttctggacaatgtgctgctgcttgtcatatttctacatggtaagacctgggcctgccttgcctgcctgcctgccgtgtgtgtgtgtgtgtgtgtgtgtgtgtgtgtgtgtgtgtgtgtgtgtgtgtgtgttcttagaagttactttaagatatttttgtatgctaatgtatgtcctcatcagttgatttgataaccaatgaatctttaaccttctaactaaattagaacaagctgattctgaaagaccttgtctattttaaacatgaaagtcagtcccaaacactggtttttaagaatatttatttagacttaatatccgtggttactctgggttttttgtctgtttgtttgtttttgtttttaagattcatttatttattatatgtaagtacactgcagctgtcttcagacaatccagaagagggagtcagatnnnnnnnnnnnnnnnnnnnnaaccaatattatttgaatgttgttttaaattattcatgattaatagtgacaaacctctaaaaggacaaattgggttggtgcaatggctcagctgctaaagatacttgctgtgcaactggagacctgacggctccctgaaacccaagtcaaggtggaagagggaaatcagcacctcagaatcttcctctgacctctacatatgctccatggcttgcaaaacagacagacactaataatgataacaatgataatagttactatcatggcatgcactcaatacacaccaataataatgttattttctttatttgtgtgtgtgtgcatgctttgcccacatgtgtatgtactcagttctcacagacctcagaatgggatgtcagagcccctagaactagagttacaggcagttgagagctaccatgtgagtgctggaattcaaacctagatcctccggaagaatagtcagtgctcttcaccactgagttctctctccagtcccaagctaagcatggtagcatacagctgcattcccagcgtttgagggggtgaggtaggagggttgttggatgtttgaggcaagctgtggtcgggtcgggctttatctcaaaacccccactcccagagagaaacagacataatttacaaaataataaaaaggcagataatttcctctgtgtttttcctttaaggttatattgcaccatggagtggcaggttttattcactatgggatactgggtaagttgaaatatgctactttggcctcctattcaaaagcctttctccatgcgttcctatattgtgaggacttcagtcattacttaagcaatattaaatacccaggccgagctgtttgaagtgaatgcctgttgttttgagacctaagttctatattcctgttctacagagccaactccttattgttttgtcagagcagaagcatttgtatgatttaaagatgggaacttttaaaaaaggaatgaatataaaatttacattttaagttttgataccgataaggtactgtattagagatttatatgaagtaggtatgaagaactctttgtataatcacttaatttaagcttctgcttaaaaaacctgaaatacactaagggtgcatggtacatctttttgagggtgctatataaaaggaactcattttaaaacttgggttttgaattagaccaactatttcagggaaaccttttgtctttagaatgatggcctagtgctgcgatgatgtcactgtctgtgtggttgctttctagatgacccagtaaagtccgaccaccatttattgatcaggtgtccttccaataggacaccaaagcctcctgtgcaagtgaaatcacatagaataaactgtctatggctaaaacatttgctgacttttatccagagataggtggatccagagaactggagggacccagttacagaataaaatccaaagtggatgtgcgtcagttgtacttaggctttagagtaattttgacctttttggaatctcagcgtgcaaagtgacttctgttgtcacaccgatgccagccacttccttgtccgggaaggcactggatggagcacaggagttagagggtcaagtgctttctgccaccaagaagagatgaagagacttgttgctatagaagtaggtgatagagctggactacagacagctgtctacccgagcaagggttagaaccagagccagcagtttcatgagccttagatagctccactttaaggggacatattcgctttagtttgacaactgtgtcactagctgcatcagttaaaaatacaagtttgactaaggaaagttgggagagtgaatgtcagtgatgcaggagagcttgttcatctaaaggaaggagctcctgttttatcctttaactgtaataataatgaacttttttaatatcaggtatgcaaaaatacacattccaattattgcatcagtgtctgaacatcagcctacgacatgggtgtctttcttctttgatctacatattcttgtatgtaccttcccagcaggcctatggttctgcatcaaaaatatcaacgatgaaagagtgtttggtaagatttttaatgaactctttgattcagaacagttttttccactgagattactctaatgttttgttcaagaacattttttctgttctacaaagatgcttagataagaaaaattagttggatttttcagtgtatgtatattctaattactactttttaaatataaactttacgtccagcccatgacctccttgaatagtttcagctcccgatggtataggaatcacatacctcattggcttttctgaagcttatagcctttggtctgaggctgtcaggcttctttagagcgccggctgctcaggcctgattgtcctttccagtgctacctgacagatatccgtccgttgtgttcttcttatccgtgttggctttaaagaaggtttaaagccagacgttggtgctggctttctgaggctgttttggttccgtaaacttagagtgcctaatgataaatgcacacattcattgtcacctgtcagctatggatattataatgtatggagctataatttttttatatctgtaataattaaatttgaatgatagtacatttctctaaattatttttatttagtcaacaggactaaataatttaaataggactattggtcaatattaataatttagaaacagttgctttgtgagatgccaactttcagatgtattctgtgctgtggtgatgaacatgtggtttcccgggacatttttctgtcggtgttgaaagagaacctgtctttgcagtcgctctgtatgcgatcagtgctgtctactttgccggagtgatggtgcggctgatgctgactctgaccccggtcgtctgcatgctgtcggccatcgccttctccaatgtttttgagcactatttgggggatgacatgaaaagggaaaacccacctgtggaggacagcagtgatgaggatgacaaaagaaacccaggaaacttgtatgacaaggtgagggctgtgctgtctccatcttcccagcaccagaagagtccccagatgtagaagagtgccgagatgcgagtacctgaagctgggccttctgcagtttctctccattgcttcctcctgagctgggccttctgtagtttctctccattgcttccttcaaagctgaaaccctagttgctctttgagctcagagtaaacagaattagtgcttaggtatgttagcacctttcattttccgagagcacggctcatcagatttcccgatgtgcaccagtgcttgcacttgtcctgagtctgcgtttgctgcgaccttgtgtggttctacctctgtgtattagatggtaacttggtattcaaaagaagtgtttggttaaacacctgtttgttaacataatgaggaatttaacctgcataacaggacaaagcctgtgttggacacaattataggaaagacttaggaattagtgcacttgtcttaaataacctgttagactttgctcttttaatactggctaagctcatcaatactaaccagcagggaaatgctgtaatataagaattggctggaattctttcttttcttactctgaaatcaatataattcataaagatttgtgttaaaagcacatacctattattttttttaatcatccttataacttagagtttatggctattttgtttccaacagaggtaggtaggggagtgtgtgtgtgtgtgtgtgtatgaatgtaagggtaggaggaggtagagatttggctaaatctgtagagtttctctcctagtaatttcctaatctatgttttaggtgggcacagccatttcgagagtagaattaattttaaatatatacataatggattttggagccccatggttaactcttttatatttaattaaaagctgccttctgtcagagatagtttgctctaagatcaggtcctggagttgtgtattttctgattcacatttactttaaagttaactttgaattagaaaacaagagcaaatctccccagtacccgtagaagattacatccttctctgacccatggaattatttgataggttaatattctcccacttttccccttgactgttgatgaaccaagtacaagggcttctaactgcttgctctgcatcttcaggcaggtaaagtgaggaagcatgtgacagagcaagagaaacctgaagagggcttgggccccaacatcaaaagcattgtgaccatgctgatgctcatgctcctgatgatgttcgcggtccactgcacgtgggtcacaagcaacgcctactccagtccaagtgtggtccttgcctcctacaatcatgatgggtaaggggacaacttggctatgagagggctttataccttcctttaacctaaccagaaagaatgtctgtgagactctgatctggattctcctccttaaggtggtgtagagatgcggccccacccctaagtctactcactttgtcttttggtgtggccttgccccatccttcagaatgggtagcaagaactagtttgtgcttttctcaaatctttctgcaaatataattgtgtatacttagtggacactgcatcatcattagtgtgaaatttggtcaaaatgcaaattacagagcccaccctaaggcttacttgagagacctgagggtagaacccagctagttgtgggtttaatggaccctgatggttgcagggacaacgccacatcttagcagaacaccaaactgtgtcccagagtaagttcattagaatattatattttacaagacaagtgattttttttttcacattagtttgaaaacactagtgtagacaaagctccttttttttttcctcctcgtaggtagagcttctgactaccatctttgaaatgaaaatttttacggattaaacacctcaaaaatttaaactatctccttcacacttatagacctcatttaaaataaaactgtgagctgtttttgtttttcagtaccaggaatatattagatgattttagagaagcgtacttttggctgagacaaaacacggatgaacacgcccgggtcatgtcgtggtgggactacggctatcagattgctggcatggccaacaggaccactctggtggataacaacacctggaacaacagccacatcgcactggtgagcgctcggtgttactgttcgttttttaaagagtaaagtggctcgtcctacttagcactcagaattcacttgtaattaaacagaaaagatccgggttaaaattcttgcctgcctgtgtattcttgttttatgagtggtattatatgtacagaattgcaggctaggcaaaaatctaaaacttaaaaatgcttgatacatagttttttcattgcaaatttaagaaaattcttagaaatatgaaaataagtattttacattgtgtaaattatatgggtgtgcaaataatatattcactttattaaacagtgagtctccgtaaatgaatcccttctgtactttaatgtctgagtacataaatgggtcttaattaataaattcagcagctttcatgagtattgtagctgaatatcacgtctgctgggctcagaagagtctgtgttatggaaatcacaggccaggctcagcctgaggttgggagaaaactgtctctgaatgcttgcctattttcatttaaaatatgaattccctagaacttaattattaaaacatatattcagattttgacacttctgccatgaaatggttattgcagttaagatggtagtgaattcctctaagttcattacattcatagaaaattatttctactcaaaattaatataaatcaaacttaatttcatcttacagtttaaaaaaatgtacacttaaattttatcctacaggtcggaaaagctatgtcttccaatgaaacggccgcctataaaatcatgaggtcccttgatgtcgattatgtgttggttattttcggaggagtgattggctattccggggacgatatcaacaagttcctctggatggtcaggatagctgaaggggagcatcccaaagacatccgggtaagcagcacacagtccacgggcgcacgtgctctcacagttgctcatttaccttctttcccttccgttcctcactggggccctggctggcctgggcctcctgaggatggggctagaggtgtgcgttggcaacacacccagaggctgcgctgttttcctcctgtcctgctctattgctgtagttactccagtcattaaaaacagtaacttcacttcggatttggaagcctcgtgtgccgtggaccagcttggtagcagcttgtctgtgaaagcattaccctagacaacatgtgtacacaggaggtagtgtggtccagattgctgtttgtgcactctgatgttcccaagtgaaggtgccttatagaaggcttgtctcggaacacatcctcttgattgtgattccgtcctgccctgtcaggacttctggcttctcttctcggctcttgcttcagcccttcatttgcgttcccattttgctccactactaatcttaatgtttataaatatgaaagagaccaacagtctagaaatgactgtctttgctttggtcctgtgccttcttccatgtaatatatgacattcattgatcatgtcattttttgctttaaaagccttcaacagataatggagccttgaaatcaaacagataaaagttaaaactgaaactgtcagctaggtgctccaggcaagttatgttatgccagtcaatgtaaatgctttgagcattgggcctttttctaggatctagaattagtatggtgcccaaggcaagacataagcttatcaccgttgaatataggtgatgacgtgtagaggtgttagaatatctgtagtaatatagttaaagccttagtatgttctatctcttggtaaagcactggcaaaaagtccaaactcttgcctcagtgcaagcctagcctccctgtgctgctctcttggccagctttgtatcactgccaggctcggctgttctgtccctgaaacttgcctaggctttcttcccttgccttatctgatgtgtgtttttaaaattgtgtcttggactgtttctccttccagcacccttggcccctcctctccagccctttttgggtatactcacgtctctatttgtcctcatagaaaacggctttctagttaatttcatgtttcccatctcctgaggacaggtaggtagaattttgctcatgtgaggaaggcacaaaagttgagaggagagagaaacagacaagggtgaagcacaggctcagatgtcctgcttaggtgaaaatgctgtgacctccccctgagctggttataacaagcattcagtccttacaaagtatgaaatgagttggtttatccctcacaagaagagaacaagcgagtacactccttcctgcttatcatgtacttactgccgagagcagattgaggccaccgtcggaaggaagggagggagggagggtgtgaggtggggccctgtgccacggtgtgcacacctcacagcacacagtgcaccacactgctttagcagttacaggaggtccctgcttgtgcctaatgctgtgttgtgtgtgtgtgtctacactggtgacttccatagaccaagaatctgttacactgtggcccttatccccactcatcatctcccttacagggtccactgtgtgttcgcattcatttgtgtgatgagcatttgtgtctggcatagtaaatagttttgtgcgttcattatttgaatcatatacaagtatctatagaacatagtcctgtaaagggaaatattgtgtcagaaattacatttttactacctgaacttacatttttaaaatagtagcaatctatgcctcatagaaaagctaatttataaaaatgaataaaaaaatagtgctgtatattccttttagtttactgaaccgtcccctccccagctaaaaggagagtttagggttcatagggaaaattgaaaacaaactccaagaaaggatgtggagctagctctagctgacatgtagtcggtcttggtctttttaactgtgaggctataaatctgacaggattaattttggggctgggggattaaaaagagtataatttcatgatgctgtctccagagctagcgcctgtagctttgggtacaccaaggtggactgacactgaatttgtggtttcttcccacaggaaggtgactatttcacccagcagggagagttccgagtagacaaagctgggtctcctactctgttaaactgccttatgtataaaatgtcatactacagatttggagaaatgcaggttggttcaattgagttcttctataattcttaatcaaatgggaaggggaccttactcatctcttaaaaacttggactaatcatgtcttaattctcctgtggagagatgtatgcagagcttcttacccattatatttagatgtcaaacccctgatcatctggggttagaggcatgtaccaccatgcctagctcaatttctgaatgtttttgtgacatgttaaaaaaaattagaccagtgagtttttcttatctgtaaataatggagggtggggtagactggtgacttgactttgatggaaacattattctgatattaaaaaattagttttgtgttaaaagcaattatatagcaaacagaaggatattcttcatctggcctcactcctgctgaaaggcaacacctctgtccagagaggacaccaaagcagtctgcaagcaggccgtccacactcccagcttgtccccacacacgctggccatcacttctgctatgcagagagagccctcagccttctttccttgtctctccaccaccttactattgttggttgagcgtgttctgtgagatgggattcgagtcacttctcagtgatttcccgtcctatgttgcatgtattgataagcttggtttgctgttggtattgtcttttgttgcagggatccatcccaacctaaggaagtcctgggggctggaggcaaacagtatctcctctattgctagtcagtctatagcctgcagtaccacgttaatagtttgattccaagctgtcagtaaaaacagtctgttacttgctagtgagcttggcaccttacaaattaaaggaattatttgtttactcttaacctgaaatgctctgtctgaacttcaaactgtgaaacaggttttctccacttgtaaagtagttctgtaactgtatgaccttgaagggtgtgtgttgctgctttctgtgttgccctaggggaggtgcgcataggtgggtgtctgcttctgtgttcacctagcatcactgtaggtaactttaaaggcaaaacaccatgcccacagttatgtaaagttttattttggcttcttttaaaggacacttgcttgggattcaaactcatgctaggaaaacatacctggttataatagttactctagaaaataatcgtagaaattggtcgaaatgatgagttctctgcatggaggtttcttttttcccctccttaagttttatgaacaatttaaggcctattggtctcatgccttaggaagcatgcatgttaaggggggtaatgtaatttttctgttgtataggcaaacaaagacttccctattgttttatagactggctttacactgcttggaaaaagagatggttttcatttgtcttaaagttagatttatgtctgcgtaaacttgatctacttaaatgtgtccattggctttttgtttctcctaagtcttcccatactcagctggcctacctccccttagacaccagaacattgttgtcaggggcgcttcttttatttaaagagatgacagtggttacattaagtcagtccagtgcatcagagttgaatgaagaccacatggtgtaacggagcagatagtcattgtgaggccctgaggtgaaaggaagcgcctcctccatcctcctctactctcctccatcctcttccatcctcctccactctcctccatcctcctctactctcctccatcctcttccatcctcttccactctccatcctcctccaccctcctccactctcatccatccttctccatcctcctccactctcctccactctcctccatcctcctccatcctcctccatccttctccatgcccaggaccacacttaacactgcatatctatcaatttgtaaggactctgacatatatactctgatgggtctagttgtcttcatgaattcttctatctgggcattgagacctgttatgatgcttcttccattctgtattgtagatttaaaaaaaggtcattgtcctttgacagtagttgctactttgcaatactgaatgttttccaaaaggctaacattaggttttgatgtttctttcgcagctagattttcgcactcccccaggttttgaccgaacacgtaatgctgagattggaaataaagacattaaattcaagcatttggaggaagcttttacatcagagcactggcttgtcaggatatataaagtgaaagcacctgacaacagggatacactaggtcacaaacctcgagtcaccaacatcgtccccaaacagaagtatttgtcaaagaaggtgggtgcctgccgaaataatctcctgggttcagtgggttagtgggtgagtaggctgctattggaaatgctaacaactgctcatgaagaacatgacggattgtgtgaggaagatacaaggctacaggagtcctgttttcatcaggagcacttgagcaacctcaagccacaactttgcaggtggcctgctggttgttggcaaccccaatggaagcttttctgcaggcattcttactccagtctctgcatctctccctgggatctaaatggtgtctggctagtgctgtcctgcctgcatgaaactcagaacttaggagagctgtagtgactgcttcctcctcttcaggttaaagcacacttgtattcatgctctactcttgaatggggcttttattttgtttgctgagtagattgtctgcaattaatgtaattactatgacagagcttgtaggcagggattgtgaggagaccatggcagtcctttcttaataaacagtgggtcaggtagtctcttactggggtcattactgctcctgtaagttgggtagatgtcctaaccttccctagtagagatagctgacagtgacagtggccgcagggagaggtgccgtcagtcaggagtgccgccgtggctatggttgcatagtactgatcagtaaactgatgcaggcagtccctagggactccgtaacctgaacagttcactcacactggctaagtacacgcccaccacttcagaacatgagtcacatcgcttagactttccaagtggtaacttgtattcacttttatgaagtgatttgcagtgtagactaggctggtctgaaactagaaactttactgtcctcacctcctgaatactggctctatgtatgtttaaatagaaatttatttttaacatatttagtttgaggagtggaggaggaggtatgccccactcctgaggtgcagagatcagaagacagtctgtagagttggttctctccaccaccagggcagccttggtaacaagtgttaatgtaaaaacctagttcctgcatgagatacatacagtgctttcctctgcgtcttagatctggccatcctcttggtttagcagatgtccttgtagcagtttctccaaccatatctggtgcagtcttctacagaaacacctgcattttagtagggctggagagatggctcagtgggcaaagtgactgctgacctgatccctggcacctgcatcagaagcacattatgacaggcagcatacacctgtcaacctaccactggcggggcaggcagatcccttgtcacgccaaccttgctgaattggtgagctctaggttcagtgacagactgtcactgtctcaaaaacaagatggagaacagtagaggttggcgttggacctatgtgcgtgtatgcctaagtgcacacatatgcccacataaacaatattagacaacaagctgtgaagaattgttttatttttacaagatttatgaaactagaggaatgtttgttttcatcttgacatgctgccttcctcagaggacatgacagaataggccaagggatttttgccttttaagttttgaaggtacatggattatcatcctcattctgcagatgggagagtggggctctgagacgggctccattactgtatttctgacacagccagtttcctgcggctgcttagccagcagtagcatcacctttctagttccttagactggacctggactctgctgttgttcccactaagcgtgtagtgcttgaagagggagacaggagggacgctgtcggtcctctaaagctactcatccaagttttcttacaggacagcagtgcactgtcaggtcccaagactaactttcataacaaaagctgggtgtgtctaggtgcttctgtgtgtgagacacctgaactaattccatgtattcttctctctttctagactactaaaaggaagcgtggctacgttaaaaataagctagtgtttaagaaaggcaagaagacctctaagaagactgtttaaatgcgctgttctggcctcacttgcagcagtccttgagagaaccggtctttgccttctgctcatgtcctgtttcacagcaccaagggtacagaacatcgctgggccaagtcaatgtacaaaatgttctggcaatgcctcatttaaaattaaattggtttattgagaacagctgtttctgatgtgtaacgtgaagcaagacagagccctgctgtgagcagctggcagaagatttttttttttttttattattggtacatattacccttcaaatctgagaatttggactaattgcaccaaagaaccctctaatttggtccctggcacatgcgtacctgtcaactttttttcttttacaagacctgcattttatttgaactacccaaatagcaatatgtaagacagaaatgcagatgtgatgagagcttcttgaccagtaaacaaactagcccaggtctgagagagacgtgctaaaggagagtctacgtctgggaactctatttattttcctgtttctccggtgtgaagaatgtttcatcaaatgtccactttgtcgctcactgccgctgtaagcagccgctgctgacggtgggcctccctccgcgtagttagctgactagatgtttgtgttcaggcatccggatgcactgcggttagcgggcatcctcaccaggtactcacagagcagattccatgcattcttcattcaagggctaaatttctctcctttgggaatcatggcaagcgcacacagaacgttgctggccaggatggctgttacctcagtactgaggtcggctccatgttcccacgcagaagattaagggaaagcccttacggtggacaggcatgcagagttcatttctgtgactctacacagtgacaaaggatttgtaaactttgcctggattttcctcattttataccagttttgttcatcacgatggtttctgttgaccgcttcatatttttataccttaagcatttgatgaaacactctctagtgctctctaggcgtttcttacttttattacaaatgtgacaattgtcaaaagatgcactaaaatataaatggagattgagcctgttcattttccagcttataggcaactttatacagacttgaaatctttatccagttgtttagtaaagtgagagagaggtttcctgccacaggagaacttttacacaacaccccactgctttagtgggacagttgagagcagtgtgtcccttttatgaagaacccgtcatttacagcgctccgggagagagaatgttactgcagatcccttttccacggtgtagatactctgatttatagaattcattcttgatccagatgatggttctttcacagaccaataaaaaaaaagtataactaaatctggatttctgataccttgtcatttgggggattttatcttactttgctttacagttccatgcagagaagttatgaccatgagggaaataaagcttattcaatttgtgtcacgccttgtctcttgcagaccttgtgtttgaaagaagtgcagagttctaaccccagactcccctcttctcaccttagaaaggtctcagccagtgtgtggaaagtaagtgcgttcataacgcagttttaaattccacctttttactcagaataagcacacctcattatgactttggggtcagaagaaaaggcagccaggctgtgagggcagccattctgcacgctcagagactgcatagcccagcattgagtgcagttttcacaccattcccgcaccttcctcgggtttagggagcaagtttggttcaaggcttggtgtcagtgaagcacacagtatgagggtttggatctcacagtgctggagtggggaagtgacaagttggcggtttcaccacactcaagtgtcagctgctgagcttacgagcttgttttgaacctaaattcattttacgtgtgatcattagccctaggtttcacagggaggttacatggcaaatggcagtgggtgtaatataaattaggcaggcttgagcttccaaactgacagtgctacccttagtttacagtgtggcattcggagtgcctgagtgatgagcaggaggccaaagactagacagtgaaactgtcaactgttttatagtgttgctagtcaagcgaccctcagaccctaagatctggagctgttgcttcctgttgaaaaattgttatagccttggcattgttgctcattggttggacactcgcctggcatatactacacactagccaaaaattgctctgaagtccatatatagatcggggctggggagggtcatgactcagtgctggtcatcggaccttggcttgatcccccagcaccccggttacaccaccaccaagctgtgacctgtgtgctaagggcagggaagagactcaagctcactggccaaccattgtaactgaattattgagctttaggttcagaaagagctcaaaaactaaggtaggacgtgcctgaagcagcagctgccatgccctctgctcccgctgcccagcacggacgccgtgtagtactgctgagtgtatataccccattagacaaccgatctgccagtttcatctggctggtgcttctcgtggtttttttgtccgtttgccttgctagccttaaccctgctgaggtggggaaataggcagccaagcatttcagccgcagcctgcagtgcagtgggaagaccaagaaaacaagctaatgaggtggtgtgttaaagaggtggaggatttatacccccagccaggatcaccccaggagaggcaggcagcattcttgaagctgctcctatgtcctcccagccactgccagcaatgaatcctgcccttcctacctcagtatttccctctaagcatcagtaagtgtacctactctttgggctattgaagtgggatcatggagcatatagatagacattgcctagtcagctttcctgcagcgtttgtaaacgcatcctgattgttggacccaatggaagattgattttcatcaatatgtaatactcccgtctctccaccgcttgctcaaacatacacatccattgtggtgttggttggctgacggacatttgcaaataatgccaagaagaccgttccacctcttgctgcttacgtccctgatctcttctctcacgcttcgcccatggttggagtcgtgtccattgcttccatgccctgcagcctttcacttcccctcctcttgctcggcctcccatgtggaggtgacgagctgctgcacccagcacagtgagagcaaatgattccttgcatttaccccgcctgccttggctcaccaagaaggtggttggaattattagctaagaggtcaccgctgttcatcttgcgggctgttagggattaatcttttgaagtcttttttatgtatatggttctctgtaccttgtttttttaaaaaaaaatctttttataggctgatgagctgacttggtgggtaaaggtacctgctggctgaaacctgggttcaatccttggggtgcacataatgaaggagagaacagacccccttcaatttatcttctgatcaacacacatgcccaccccaccccaaaacacatacacaataaatataaatatgtaatgctaaaaaaaaattttttttaagaaaaatcctttttgtaaagccacaaagaccatgcctgtcctgtgtctggttctaggaaatttgccaacgccttttctcctttgccttccacccaggattcccttgttgcgtacactgtaaaatgcatgtttgttggtggcaactgttgtgacatgtatgcctaaagtttctcttttaggggctgtggtgatagttcagagggtaagagtgcttgctgctcttacaagagacctcttggttcttagcaactgggcagctcgcaactactgcagtttcggggaatatgacgccctcttctggcttctctgggtactcagacatgtatacaaacacataaacccattcacagaagtatagatgtgtatgtatattttaaccatgatggctaacatgttgtaaccccagcacttgggaacttgatgcaggagtaagttcaccttcagcttcttagtgagttcaaggccactcctgagctagagaccttactgcctcaaaaaaaggtttggttgacttcttttttaaaaagtcttttgtattttcatggcttctattagccagtgtcctagtttgtgacttttggtaaatatgtcataaatatttaatttctccttattagactataaaagcatgtgttcttacaccatgaggttttatttgaccttgttatcggcattctgccattcaggggttcatacagttggccctgtcacttggcaacagtggtggttttgttttctttgtaattggtttgtactttgttgtctggcttctctctcactgggaaagccactgatatttgccatggatataatctctgcagatacctttgatcaaacgaagcaaattaatcagaaacactttgaggtttgtatttggcagagggtcttactctagtctgggttgccctgaactcatggcccacatcaggcttctgagtggtggattacaagcatgtaccaccatgatggtataagtgtttgattttatgtctgtgtggtttttgtcaacctgtcacagtcacctgggaagaggaatgtcaactgagaaaatgtctttatcacagtgtcatgggaacatgcctgtgggtcattaccgattgatggaggagggtccaacccgctgtaggcttgccacccagaaaagtggtccccggttgtagaaggaagaatccagtaaacaaaactgctctagcgtctgctttgttcttgccttgttcctggcctgtcttccctcaatgatgaattctaacctggaagatagaatgagccctttctttttgtctgttgctgtgataaaacagacagtgggccattgctgtgacacagctgtcgagggaagattgtggaagagtttgaaactttgggctggaaaagccattgagtgttgaaagctttgagcttttgtgggagtttttgaagattgagaatgttaagagaaatccagactatagaagcctggattgtaagtctcaagggaagcaaaaaacgatcagggctatgcatgtggtatatttgaattaataatctgttgttggggctggagagatggctcagcaagagcacagattgctcttccagaagtcatgagttcaattcccagcaaccacatggtggctcacaaccatctgtaacaggatctgatgtcttcttctgttgtctctgaagagcaacagtgtactcacattaaataaatatgtttttaaaaggagaatctgttgtttctggtcagcttgggctgaagaatcatctccgattcataaaagatcggcatcaatgaggtaaaatcttgtgggaactattttttcagggttagtacacagctgagttccagagtgggccaaggctccatctcatcccggtagccaaacttggtgatgtgtaaagggtctcccatatggcacaggtattgaaggcatgagagggtcatagtggctgagagttggggctaggagaagccattggagatgtcgcagcctcaattgcagtgggagactggagaaaagccaagccaaagcttagcaccatacagcacagttaagagtccccaaagagaagccaggagaccattaaaggtgcagcctcagttgcaatgggaactctagcagattggaaatgccaagctcatagagtgaccatcatggacagtagctagtgttgagtacagacagcctgagcatataagataacctgcaagtgctgctgataacaaaaccagagatgcgagagaggctgcccaagccctttggagcccagaagataagtagtaagtcccaagtgtcagacactgagctatttatacagttgatttggggtttgctttaagctgattgttattgccctggttctcttaaactaagtctttaacttttttcttaaataaatagaaacccatagttaaagacttagaactttttaaatatttgaatttaaggacttggacttttacgtacaggtcacatgacaacttgaatccgtactatgtgtgtgctgggtctcaaattcaagcttggcgggcagcacgcccctttatcttctcaacagccttgtcagccatgatatgacaaaatccatagatctgtttaaagtgagcatgttcttaagttgtgtctcctacctccagtacctagagagtctgttctgttgcatgggctttctcatgttggttgttatctatggtcttatctatgtaaaatgggggctttgctggtacaagcattctattaagaacagggtgtggtggcacacgcctttaatcccagcactcaggaggcagaggctggcggatttctgaatttgaggccagcttggtttacagagtgagttagttccaggaccaaaaaaaaagagaagaagcagctgtatgggtaagtgtaggctgggtctctggttttacttcgcaggagattgagaatctgctggagaagtagggaaatttcccaaggcagaatcacctgaacccagtttaaggactaaatacacaattctggcctgctctcattgctcccaaggtgaagctgtgcaaagacttcagccagatacgtgagtatacacatttttttctcatcctgtaaaggtatgaacatctctttggcctcttccaatttcccaggaaaatagccccaaatgctggctttctctcagaatatgactttcctctggtatactggcctgtgttcatcttgcaataggattcttgtgtacagattttccagccatctttgctgggcttttgtggtctgtcctctaggctcccgctgtcagagggaactttcacaacaaactgtccctttggctctcagagcacgtgtagcacctgcttcttacatctcttctgccgcctcactttaatggacactatcaaagttgtgtccctgaacacaaccacaatctcagaatcctccttgggaagtatgacacattcggggcctggtttctagttctgaaagcaacctggaagcacttgggttggaatatcaggtgtctgctgtgctcagatggctttggtaaaaggctggggaccaaaccaaaaactgaaggtatcctgggtagccagagcgactagctgagagtaatgtgtacttggtgacctcagctgtccttgctgttaaaagccaccatgactcaccatgtgatcatcctcctcatatgactctccgttggcaatgattagcctggatcagaaactcaggcctgtggaggcggaggggaaagttttagaaaatggcactctagccctgtgaagaaaagcacagtgacaaacattgcaaaagatgggcgctaactggagtcagtgacagccctctctccaaggaagatgcaagtgggattcagggaaacctagccacgggcgagcctgccaactcctgtagcctggttgtgtaacatcgcccatcgcactgggtgtgtgctgtaatgtgctgatttttgcaggactcaattagtttcacttcatcaactcagcaccactattcacagacttgcttcttccatttaattggctcagtgttgaaactgaccaaaaagtgatttctctactgatccggttctgtgttcttaaactaccatatcctgacactgaagccttaagtcagcttgtgcagattgtgcctctgttcagtggcccacaagcatgtcctggcatcttggcaaaacaaggaattgtcatccctctgccctgaatctgatgaaggaacttgtgaaccaaaggaaggcatatggtagatcatcatgagaccttaacagaagaaatcaaaatggcaaataaacagaaacaaatgtaatatacaccaggctcactaagcattggagaatgtctaaaaatggactcttattggtgggtattcaaatggcttggcgttagtgtgatttgaagatacacataccctagttacagtcaacattctttgaagttgtcaaaagaacacaaaatagggctgagaagatggccctgcatttaaaagacctgctacagaagcaggagaagtggggttcagacccctagaacccatgtaaatgacatgtagatgtagccaccgcctgttacctccagtggctttggcttcagaagttctgggcttgattgagagagcctgccccaaagcagaatgctgagtgatggaggaagagtcccaacatacagcccagagctgctacgtggacatgcacacacacgtgcatacatgtgaaaagaaagaggggaattgatagttgatgctcacataaagggaaaaaagatgtttctttaaagaaaaataatatccaaaacataattggcgttaaggaaccaaacaagaatatgtatagcgcatgctgaaggcctgaggcaggtaaaccagtatatatcatttcaggttcttgcagcatccacacagtaaaaggaccactcacctgaagggtgacagtgctcagggcagaagagtagggaggagggatggggactgggtgtgaacgggactcttgggaagtgtggagaatattctgctagatgactgtgatgtgtcaacatcatcccactgacaactctaccctgcaccaagagcaagggaggtgagccagccaatggaacagtccaaaccttcctcactcctggaaaccagtgctgctagaggattcctgaccaaagtagactctgggaacgctgacaaaaaccccaaaggtctacagggagcaacaagtgccagtccaggaagccatgtccagatggtgggaaatggtaccccacttttacttacccacccccaccccctgcagtgcggagcagaacagagctcagctccactaatctgtttggagctgcctggggatctaggctccatcttgcctcttactcccacgggtaaggctgggcaagctgtggaaggtgcaggcagtgctcatgaggctgccccggggtttgccaggaccagatgtaaagggtgtggaattatggggagggtaatacagcatcaacgattctaagaacctggagagaaattttagggaattttaagatttactctgtgtgtctgggtggtgatgcccttgcccacagaggccagaaagggtattgggtgccctggagctgaagctattagtggttatgggccaccttctggggtgctgggaactgagtttgggttctctgcaggagcagtaagtgtgcttacccactgggtcatctctccagccccccaaatcacattttaataacagacccaagaagactgccaggctgcctatgggcctggctgagtgcagggatcaggccatcttcaccctgctcatttaggtggaggttttccgacgcagagccggcatgcaggactgatgcagaacgtgctaggtaaggtagctattttcaaaagtccactttgcaagggggagaagggggcatgcaaagtaagaaagcgtggcccacgtcatggaatttaactttttgtgcagtcttagattgtctatacatgatgatgatagcctccgccataagagaatgtccattctgctgaaacatgtccgtcttgtccttgccttaagcgtacttcctagaacttctgccagtgtctacggcagtggcataggcagccttaaccttgttctcgggcttgggggaggagcttctaacttctcacctttgtgatctttgtggatgttttgcatgtagacatatcacattgggtttggggggagttggttttgttttgatcgtggacggtactgaatcttgtcaaatgctgcctctgcatgggctcagatgactagtttgtttccgtgtgaacgtggtatgctgtgctgatattttcgttcttcctgcattcagccacccttgctgtctaagaagaaacttgattattgtcatgtgtcatccttaggatgtgccgtggcatttgctgcgctagtgtttgagaaaatttgagccaatatttatacaggatgctagtctttttttaaatctgttcttgctttggcattgggcatcatctggcaaactaggccaatccagaatggatggcctaactctaaatgtttggtaggattcatctaaggccatctggtcctggcatttttttttttttttttttttttggttgggaaattttaagtgactggtccaatctccttgctatttatagatctattctaatttcttagttcatgactcattcttagtaggatgtgtttctaggaatttgttctttttgtccaggcttacagttcttccaagactgttgatagagatggcatctcaattgtcctgtttgggttggccctaaacacgagactcaaacatttgctttcatagaactgagaacagcccctaagtggtgctgatctggggctttctcggtgtatttaaaccagggctgaggactggagacacagctcagtggctaagagaatgtactactcttgcaaagactgtggtggtcaactgcctgcatccctatctggcagcttgctcacaataatgtgtgactctggctccaagggatcccacaccctctacaagcacacgcacacacataatacatagtttttaaaatccctagaaataacacacacaagacacaagagtatttaatcgaaatatatttgtctaatatctacaaagtgtcaacagttggtcttaagaaagcagacaaaaggcacaaaattagtattactacagagaagcattcatgctactgaattttataaatatcattgggtggcatggtaaaaaataaattaagcactgagcagaaatcaaattagacatcctttttctcgagtttgtttggtccatgtttgacctgtgtgaggctgaagacattctcagctgggacactggggggctcatggggctcgtggctgtcctagttacagaggctttctggcagcttgggtcaaaattaaggaaaagaaataagactacttgttctctttccccaactagatatgaggcagtggtggtccgtgtagtgtaggcatgcgtgtactgaccttccagagccctttgtcatgaccgtgcgatttctttccggctgtgaagaacacagggtctcatgctctgggcatgggaagtgtcagagagactggataaaaccacctggtgggcctggccctgattcctcaggagtcactcccttctagaaggttccatatcagcccccagtggcttcctgtcaccttgtgcaactggaaggcctgcttgctctttctaggatgtggacagacagccttggatcagaacaagcatcaccccagggtggccactcccccctctgccggtggccactccccccctccgccaggaattcgctccttttccaggctgtgccacctcagcctgcatcgtgacaggagacaggagtcggtgagtaggacagaccatggcagaatgactgtggcaacgtgagaaataaagaacaccaactctcgtgaataaaacggagctcaaggttacccagggcagccttggcaggtgcgaggtgtgcccacgggcctcggctgcccttccttgaataaaatcctcaggcagaatttgggggtgcatgtttcatgtaacccctctctccgacttggatgctagcaagagatttcaacaaataccaacggaatcttgatactgtaccactttaattcctacaaaaccaggcctattacgg

SEQ ID NO: 1167 - DNA, 666 bp, Mus musculus
aggtaaagtctgtgaagaccgggtctgtgttctggacaatgtgctgctgcttgtcatatttctacatggtctctgcgtggggaggttatgtgttcatcatcaacctcatccctctccatgtgtttgtgttgctgctgatgcagaggtacagcaagagagtctacatagcatatagcactttctacattgtgggtttaatattatccatgcagataccttttgtgggatttcagccaatcagaacaagcgagcacatggcagctgcaggtgtctttgcgctgctgcaagcttacgcttttttgcagtatctgagagaccggttgacaaaacaggagttccagacccttttctttttgggtgtctcactagctgcaggcgctgtgttccttagtgtcatctatctgacatacacaggttatattgcaccatggagtggcaggttttattcactatgggatactgggtaagttgaaatatgctactttggcctcctattcaaaagcctttctccatgcgttcctatattgtgaggacttcagtcattacttaagcaatattaaatacccaggccgagctgtttgaagtgaatgcctgttgttttgagacctaagttctatattcctgttctacagagccaactccttattgttttgtcagagcagaagc

SEQ ID NO: 1168 - protein, 154 aa, Mus musculus
VKSVKTGSVFWTMCCCLSYFYMVSAWGGYVFIINLIPLHVFVLLLMQRYSKRVYIAYSTFYIVGLILSMQIPFVGFQPIRTSEHMAAAGVFALLQAYAFLQYLRDRLTKQEFQTLFFLGVSLAAGAVFLSVIYLTYTGYIAPWSGRFYSLWDTG

SEQ ID NO: 1169 - DNA, 4317 bp, Mus musculus
ggtctccgcccagcacccctcgctccaggcggcggcggtggccgcggaggacgagcgagacccgccgccggggcacaacatggcggagccctcggccccggagagcaagcacaagtcgtccctcaactcgtccccgtggagcggcctcatggctctggggaacagccgccacgggcaccatgggcccggaacccagagcgcgtccagggcggcggcgccgaagccggggccccccgcggggctgtccgggggcttgtcgcagccggccgggtggcagtcgttgctctccttcaccatcctcttcctggcctggctggccggcttcagctcgcgcctcttcgccgtcatccgcttcgagagcatcatccacgagttcgacccgtggtttaactatagatcaacacatcatcttgcatctcatggattctatgagtttctaaattggtttgatgaaagagcatggtacccactgggaagaatagtgggtggcaccgtttacccagggttgatgataacagctggccttattcattggattttaaatacattgaacataacagttcacataagagatgtgtgtgtattccttgcaccaacttttagcggccttacatccatatctacgttcctgctaactagagaactgtggaaccaaggagcaggacttctagctgcttgcttcattgctatcgtaccagggtacatatctcggtcagtggcgggatcctttgataatgaaggcattgccatttttgcgcttcagttcacttactacttatgggtaaagtctgtgaagaccgggtctgtgttctggacaatgtgctgctgcttgtcatatttctacatggtctctgcgtggggaggttatgtgttcatcatcaacctcatccctctccatgtgtttgtgttgctgctgatgcagaggtacagcaagagagtctacatagcatatagcactttctacattgtgggtttaatattatccatgcagataccttttgtgggatttcagccaatcagaacaagcgagcacatggcagctgcaggtgtctttgcgctgctgcaagcttacgcttttttgcagtatctgagagaccggttgacaaaacaggagttccagacccttttctttttgggtgtctcactagctgcaggcgctgtgttccttagtgtcatctatctgacatacacaggttatattgcaccatggagtggcaggttttattcactatgggatactgggtatgcaaaaatacacattccaattattgcatcagtgtctgaacatcagcctacgacatgggtgtctttcttctttgatctacatattcttgtatgtaccttcccagcaggcctatggttctgcatcaaaaatatcaacgatgaaagagtgtttgtcgctctgtatgcgatcagtgctgtctactttgccggagtgatggtgcggctgatgctgactctgaccccggtcgtctgcatgctgtcggccatcgccttctccaatgtttttgagcactatttgggggatgacatgaaaagggaaaacccacctgtggaggacagcagtgatgaggatgacaaaagaaacccaggaaacttgtatgacaaggcaggtaaagtgaggaagcatgtgacagagcaagagaaacctgaagagggcttgggccccaacatcaaaagcattgtgaccatgctgatgctcatgctcctgatgatgttcgcggtccactgcacgtgggtcacaagcaacgcctactccagtccaagtgtggtccttgcctcctacaatcatgatggtaccaggaatatattagatgattttagagaagcgtacttttggctgagacaaaacacggatgaacacgcccgggtcatgtcgtggtgggactacggctatcagattgctggcatggccaacaggaccactctggtggataacaacacctggaacaacagccacatcgcactggtcggaaaagctatgtcttccaatgaaacggccgcctataaaatcatgaggtcccttgatgtcgattatgtgttggttattttcggaggagtgattggctattccggggacgatatcaacaagttcctctggatggtcaggatagctgaaggggagcatcccaaagacatccgggaaggtgactatttcacccagcagggagagttccgagtagacaaagctgggtctcctactctgttaaactgccttatgtataaaatgtcatactacagatttggagaaatgcagctagattttcgcactcccccaggttttgaccgaacacgtaatgctgagattggaaataaagacattaaattcaagcatttggaggaagcttttacatcagagcactggcttgtcaggatatataaagtgaaagcacctgacaacagggatacactaggtcacaaacctcgagtcaccaacatcgtccccaaacagaagtatttgtcaaagaagactactaaaaggaagcgtggctacgttaaaaataagctagtgtttaagaaaggcaagaagacctctaagaagactgtttaaatgcgctgttctggcctcacttgcagcagtccttgagagaaccggtctttgccttctgctcatgtcctgtttcacagcaccaagggtacagaacatcgctgggccaagtcaatgtacaaaatgttctggcaatgcctcatttaaaattaaattggtttattgagaacagctgtttctgatgtgtaacgtgaagcaagacagagccctgctgtgagcagctggcagaagatttttttttttttttattattggtacatattacccttcaaatctgagaatttggactaattgcaccaaagaaccctctaatttggtccctggcacatgcgtacctgtcaactttttttcttttacaagacctgcattttatttgaactacccaaatagcaatatgtaagacagaaatgcagatgtgatgagagcttcttgaccagtaaacaaactagcccaggtctgagagagacgtgctaaaggagagtctacgtctgggaactctatttattttcctgtttctccggtgtgaagaatgtttcatcaaatgtccactttgtcgctcactgccgctgtaagcagccgctgctgacggtgggcctccctccgcgtagttagctgactagatgtttgtgttcaggcatccggatgcactgcggttagcgggcatcctcaccaggtactcacagagcagattccatgcattcttcattcaagggctaaatttctctcctttgggaatcatggcaagcgcacacagaacgttgctggccaggatggctgttacctcagtactgaggtcggctccatgttcccacgcagaagattaagggaaagcccttacggtggacaggcatgcagagttcatttctgtgactctacacagtgacaaaggatttgtaaactttgcctggattttcctcattttataccagttttgttcatcacgatggtttctgttgaccgcttcatatttttataccttaagcatttgatgaaacactctctagtgctctctaggcgtttcttacttttattacaaatgtgacaattgtcaaaagatgcactaaaatataaatggagattgagcctgttcattttccagcttataggcaactttatacagacttgaaatctttatccagttgtttagtaaagtgagagagaggtttcctgccacaggagaacttttacacaacaccccactgctttagtgggacagttgagagcagtgtgtcccttttatgaagaacccgtcatttacagcgctccgggagagagaatgttactgcagatcccttttccacggtgtagatactctgatttatagaattcattcttgatccagatgatggttctttcacagaccaataaaaaaaaagtataactaaatctggatttctgataccttgtcatttgggggattttatcttactttgctttacagttccatgcagagaagttatgaccatgagggaaataaagcttattcaatttgtgtcacgccttgtctcttgcagaccttgtgtttgaaagaagtgcagagttctaaccccagactcccctcttctcaccttagaaaggtctcagccagtgtgtggaaagtaagtgcgttcataacgcagttttaaattccacctttttactcagaataagcacacctcattatgactttggggtcagaagaaaaggcagccaggctgtgagggcagccattctgcacgctcagagactgcatagcccagcattgagtgcagttttcacaccattcccgc

SEQ ID NO: 1170 - protein, 821 aa, Mus musculus
MAEPSAPESKHKSSLNSSPWSGLMALGNSRHGHHGPGTQSASRAAAPKPGPPAGLSGGLSQPAGWQSLLSFTILFLAWLAGFSSRLFAVIRFESIIHEFDPWFNYRSTHHLASHGFYEFLNWFDERAWYPLGRIVGGTVYPGLMITAGLIHWILNTLNITVHIRDVCVFLAPTFSGLTSISTFLLTRELWNQGAGLLAACFIAIVPGYISRSVAGSFDNEGIAIFALQFTYYLWVKSVKTGSVFWTMCCCLSYFYMVSAWGGYVFIINLIPLHVFVLLLMQRYSKRVYIAYSTFYIVGLILSMQIPFVGFQPIRTSEHMAAAGVFALLQAYAFLQYLRDRLTKQEFQTLFFLGVSLAAGAVFLSVIYLTYTGYIAPWSGRFYSLWDTGYAKIHIPIIASVSEHQPTTWVSFFFDLHILVCTFPAGLWFCIKNINDERVFVYAISAVYFAGVMVRLMLTLTPVVCMLSAIAFSNVFEHYLGDDMKRENPPVEDSSDEDDKRNPGNLYDKAGKVRKHVTEQEKPEEGLGPNIKSIVTMLMLMLLMMFAVHCTWVTSNAYSSPSVVLASYNHDGTRNILDDFREAYFWLRQNTDEHARVMSWWDYGYQIAGMANRTTLVDNNTWNNSHIALVGKAMSSNETAAYKIMRSLDVDYVLVIFGGVIGYSGDDINKFLWMVRIAEGEHPKDIREGDYFTQQGEFRVDKAGSPTLLNCLMYKMSYYRFGEMQLDFRTPPGFDRTRNAEIGNKDIKFKHLEEAFTSEHWLVRIYKVKAPDNRDTLGHKPRVTNIVPKQKYLSKKTTKRKRGYVKNKLVFKKGKKTSKKTV

SEQ ID NO: 1171 - DNA, 124472 bp, Homo sapiens
  misc_feature (1)...(124472): n = A,T,C or G
taggagcatactattccaataattgtgcttaagaatatacaatcagtaatggcaattctgcctcattgaggatgtgaaaagactgtcttaaatgttaaataagtacccttagccttactcatgaaggaaatgcaaattaacactaccagtttgtacctcatttgttggcaaaaagccaagagtttgttaacacactcagttggtaagccctcagaaatgggcttctcacacattgtgggaatgcaattggtacaaccccttaccgagaacaacttatctattgaaattacaaatggacatacctataccaaattttccttatggtaattccaatcaacacacttgcacttgggcaaaattccttctgcataaacttattcattacagccttatttgtagtagtacaagaccagtaaaagcctaaacatccactagcaggtgattggttgaattaattatggtgcatcctctgggatactatgaagccataaaaaggaatgaaaagtgctctatgagctgatagagaaagatcttgaagataaatatttagaaaaaaattcaagatggggaaaagtatgtatagcatggaaaaaatgagaaaataagaaaatagcttcacatgtgtttgcatttccacagagaatgttgaaaggatacaatataaaataatgaaaatgattacctatttggatgaggagagggaaggatttggctgtcaggagacagatcgtgaatgtattacctctgtatagagttaaataaaaactaataagaaataataaaatcagttctcgaacacaggctgaagaaccttagcttccaagtttgcatcacttcaaggataaggaatgctctagttcagggtttggcaaagtacaatctttgggccgaatctggtttgctgcctgttctgggaaataaagttttattggaacacaactatcgcatttgtttatgtattgtctatggctgcttttgcactacaatggcaaagttgagtggttgaaccatatgacccataaaacctaaaatatttactgtttggatctttatagaaaaactttgctagcctctgctctgtattgatatcaggtctgaatcaagtcacaagtgaataaggaaaggtgtctacccccttcctcacttaaaatacttcttctataccttcttcaatttttattttatttttttctgtgttctagagtatgtgccttttttaaaattacatattgacaaattatagttccatatatattcttcagattttatattctttggtgctaattctatctagtatgcacactagattgtaaataactatactcaggttgctttcctcttggttgaaattctacatcctaaatatagtggagaattatcttttcctttctacatccagacttgcttcctttctgtaacagtgcctcagatttcttacaagttaggtttgacccaacttcaactccaggatgcttaagccaactagggtttcttattctcttcttaaaggcacttggtcaggaatcagtatatagtctgggtgtggtggctcacgcctctaatcccagcactttgggaggccaaggtgggcagatcacctgaggtcaggagtttgagagcagcctggccaacatggtaaaacccttctctactaaaaatacaaaaattagcccagcgtggtggtgggcgcctgtaatcccagctactcgggaggctgaagcagaattgcttgactctaggaagtggaggttgcagtgagctgaaatcgtgccattgcactccagcctgggcgacagactgagactccgtcccaaagaaaaaaaaggaattggcacatgatctaagacagactaattagagccactggaacctaatttcaggacttttgtttgtgctctcaggaaaaccaggcatgcctaaagaaatgaagctgcaaacttacagcaatataaagtcaatatggtcatgggaggtggtggtgccaatatgacctaagagaaagtctgctaaaataatttctgggaaaatgtttttcttaaaaaaggaagacatatgtgattggcatcttcctgtctcctaatcttctgcctcaaatgctgatgtgatgtctggggctgcagcagctgtcttacaatagtgaggcaataatcaagagaatgaaaaccaatatgctaagtgaattgaaagtgtattactaggttcaatcaggaaaacagagatactctaggtacttcaggaataaaaggtttaatcaagaattattatttacactaatgttgaaagaccatagggaataaagataagagaagttgttgcctgaaggtcaaggtcaaggaaggagactttgaaaactttagcctgaaggactgaagcagggagctctcagaagttctctaggaaactgctccaactctcaataatctccaaaaagctccccaaaattgtcttagtcaatgacaattatgtaagttgttctcacaccagccaaaaagatgtgtaaatcttacatttgcccattcttccttttctatctgaaatcctctctgtcttttttgtcgactgagctcccctcactgacaaaatatcatggagtcatacaagaaaagaatctgggaaaagtacttctcagcttctgctatgcaatgcaaaggacagcataaaagggggtgaaaatgacatccgagaatccagcaaagagtataaagacagaaaaagttgaaagctttgttgagcaactgacttcataccagcaaccacctttctctgaatttcactttatgagagaaaataaacttctatttgtttaagccattatcctttggccctttttgaaatcaaatgtgtgcctcactgttacaatgtccttctatgaaaaccatgagatagtgggcatagaaatgtgaattttcaaaagtactaaaatagaaaattaatttcctatatatgatctggaattttaagactagagtgttgtgttgtttcaatggtagcaaataaagataaaatgtgacactgcatctcagctgtagattactggctcatttccaagtgtcccctgcttggctttgtttttccttttcctctgcttttttttttttttttcttttttttttttttttgagacggcgtctcgctctgtcgcccaggctggagtccattggcgcgatctcggctcactgcaagctccgcctcccgggttcacgccattctcctgcctcagcctcccgagcagctgggactacaggcgccggccaccgcgccgggctaatttttttgtatttttagtagagacagggtttcaccgtggtctccttctcctgacctcgtgatccgcccgcctcggcctcccaaagtgctgggattacaggcgtgagccaccgcccccggccttcctctgcttctaatgcatccttcccacactccaaatctcacttgtcaacatcctacctattcattttttttttttctttctgtcacccaggctggagtgcagtgctgtgatctcggcttactgcaacctccgcctcccaggttcaagccattctcctgcctcagcctcctgagtagctgggattacaggtgtgcaccaccatgcccggctaatttttgtatttttagtagagatgggggtttcaccatattggccaggctggtctcaaactcctgaccttgtgatctacctgccttggcctcccaaagtgctgggattacaggcgtgagccacagcttccggccaacattctacctattctttaaggccaatcacttcatgaacatgtccttgatgactgcccagacacaagctctcactcttcacagtgatcatgatagaaaacattctctgcctcatactggattttgagctagattagatcacagcaatccccttatcatctaccgcaaaggccaacaaactctggtctgcaggtgtggttgtgtttactgaagaacagccatgcctgttctcttacatattgtccattgctactttcacactacaacaacagggttgagtagtagcctgagacagcatggcccacaaagatgaaaatatttactgtgttgccttttacaaaaaaagttgcagaccccagttctattggattataaattggaggttattattcattatcagcagctaggtattgcctaactttgtaaggtgttttatttgaagcaggcattttctggcttaaagaaataaagaagcactcgtatgggctcgggtcatggagaattattttaaggctatccaggggagtaagtctcatagcccatctgtcatggttctgaatatagcagtagtaccagtgatattgttaataaccaacatatattgaatatttcctttgcgccaggcactgtcctaagttattttcatgtattgattcatttatttcttcttataaccctaagagaaaggttcagtgcttatctacgctgtaaagatgaggataccaaggagcagagatgggaagtagcttgccaaaagccatgtgactcagaagaactaaagtcaagatttggtacccagcgtgtctgcagagcctgtgctctaaaccaccacacagtaccacttagcagcatacctagctcaaatcttttttctccctctctgcttctctcctctactggggctatggactaccagggaggttctttgacaggtgcttgtcagaaagggacaatataagcattgggaattccctcagttaccagatatttgcaaatgtcaattatattgtagaccgtagcagccccctagtgtggtgtgtctagtacaagcgtacatgtcttgttgtttgtgtttctctaggaagaatgaaacccactctccgacctgtgtcattcctgggacacatcacaggcacttaaatcttttcttgatcactgtgggaaaggctagggactgcggatcgtaatttagttttttcttggtctgatttggtcctgtctgtgcttttgaaaccagacttttagaaagggtggtatacattctctgcctccacatcccttgccactgatcccttctcacctgctgccatctggtttctgcccctatgactccactaaaattgaccttgctaaagtaattggtgaactcctggttgccaaaagaaaggtacacttttcagctgtgtcacactccatttctctgtaccttgtgctgcttctgacttcactttatttccctttcttcactgctgggacattgctctatcttgggctccctgtaggcacatctaaatttggaaagtccttagggctctatcctcaacccttgtctccttgtctatagccttgattccagcaaaatttcacccgtagccatggagtcccaagcctttatcccagaaaacccttcctcctgaacatcacatctctttaagtgtctgttatccagctcctcttggatgtcctacagggacttaaaacattacatctccaaagctgatttgatcatctcccctccaaatctgctgcttgtcctttgctccctatttctgagacatcactttccatccaaataactaaaccagaaactccagatttgtcctaaaccctacttttattttaccccaatcaccaatttctggactctaccctcttgatacctctcctatcagtcctctcctctctgagccctactgtcccagttttggtacctaattctcttgcctaaatttctgtaaatgcttccttattggtttctctgcttccactctcaccctttccagtacatctttcatactactgtcaatttttttcttccatcaaccaagtctgatcatgttattgttgttcaaaatgtttcaatgaatcccagctgcttacagaataataaactcctttaccaggcagacaagtccttgataatctggttcttatccctctttcagtctcatctcccaatgcaccttcattaatattaaactttgtgtattaatttgaaggacttccttgttccttcttggaatcccccatccctcttcctggtgtgtcttgtgaacttctgctcacccctcaagtttcaactcaaatactcccttcccctggaagctgggcctctgatgtcacaccactctgctcatcatgttgcacccatagtgtttgattgactcctgagatatttgaactcaggaggatgttacaagcacctagcaggattagaacctcaagtgcaaaggggcaaacacattcaagcttcatcacaaactgtaaacaatttttccaagttgataggctagaaattgtgaattcacaatgctgcaatttatttttatgggttctctagtggttccacaatagcatattcctcacaaaagtaatctctgaattctcaggtagagcttttactggtctcctctccaaaatgcttttcacattgcagccttggtaatcttttcaaaacacacatctgatcaactctctccctctatctcaaatacactacatgctgcttaaaaccctttatggcttctcaatattctgaagttaacatgaagcaaaaaacacctcttaaaaggacctacactacccggccattcctttgactcctactgcaccttgtcccactgtctgcattgcagccacttttctgggttactcgtatgcctcccctgccccactgcagtgcctttgcacgtgcttctctatgtaacgcgttccattctccttctcctcgtccgttcatcatcacttccagtgctgcttcctcagggtaatgtttctcatccttctggtgtagatcaaattccccatgtgcctgtcctccacagtgtttgtcaccctgcattttggtcctgaaccatctgatgatttggttaatacctcccttcctagggctggctggtgaactctctgagagtaggagccctgtctttcctgttcctagctgaatccccatgcatcccagttcactcacagtggtcggcataaaggagttcaatatatacttgctgaatgaatgagtgaataaatgaaggtcaaaaatcaaggggttttcgtagggcttttcacctttaccactaccctgtatttgcacgttccttaacaatttcctaaaatgctttcagataagcttttttaatattaacaactgactttaagagcagaaagggcaacccatgcaggtgacttgtccaatgctacatgactagtaagcaacaatttgggactatttcactttgtcacttttcagatcaggcctatggccattaaacagccaaaacaggaagcaaaagaagataacgtagaacttactagggaatagatacacaaagacaataaaatagaaatatccaaacaaattaaaataaaaacacaaattttattttagnnnnnnnnnnnnnnnnnnnnnnnnnnnnnnnnnnnnnnnnnnnnnnnnnnnnnnnnnnnnnnnnnnnnnnnnnnnnnnnnnnnnnnnnnnnnnnnnnnnnnnnnnnnnnnnnnnnnnnnnnnnnnnnnnnnnnnnnnnnnnnnnnnnnnnnnnnnnnnnnnnnnnnnnnnnnnnnnnnnnnnnnnnnnnnnnnnnnnnnnnnnnnnnnnnnnnnnnnnnnnnnnnnnnnnnnnnnnnnnnnnnnnnnnnnnnnnnnnnnnnnnnnnnnnnnnnnnnnnnnnnnnnnnnnnnnnnnnnnnnnnnnnnnnnnnnnnnnnnnnnnnnnnnnnnnnnnnnnnnnnnnnnnnnnnnnnnnnnnnnnnnnnnnnnnnnnnnnnnnnnnnnnnnnnnnnnnnnnnnnnnnnnnnnnnnnnnnnnnnnnnnnnnnnnnnnnnnnnnnnnnnnnnnnnnnnnnnnnnnnnnnnnnnnnnnnnnnnnnnnnnnnnnnnnnnnnnnnnnnnnnnnnnnnnnnnnnnnnnnnnnnnnnnnnnnnnnnnnnnnnnnnnnnnnnnnnnnnnnnnnnnnnnnnnnnnnnnnnnnnnnnnnnnnnnnnnnnnnnnnnnnnnnnnnnnnnnnnnnnnnnnnnnnnnnnnnnnnnnnnnnnnnnnnnnnnnnnnnnnnnnnnnnnnnnnnnnnnnnnnnnnnnnnnnnnnnnnnnnnnnnnnnnnnnnnnnnnnnnnnnnnnnnnnnnnnnnnnnnnnnnnnnnnnnnnnnnnnnnnnnnnnnnnnnnnnnnnnnnnnnnnnnnnnnnnnnnnnnnnnnnnnnnnnnnnnnnnnnnnnnnnnnnnnnnnnnnnnnnnnnnnnnnnnnnnnnnnnnnnnnnnnnnnnnnnnnnnnnnnnnnnnnnnnnnnnnnnnnnnnnnnnnnnnnnnnnnnnnnnnnnnnnnnnnnnnnnnnnnnnnnnnnnnnnnnnnnnnnnnnnnnnnnnnnnnnnnnnnnnnnnnnnnnnnnnnnnnnnnnnnnnnnnnnnnnnnnnnnntcacattctcggattcccgcggccgcagaagccggaggcgggacgtgaagggcaatgagcaaggtaggctgtgtcactgccgccgcgggctcactcgcagcgccagccgaggagcgccacgggctgctgaacccctcggcccgacccacgcgccgagggctaggataatgcgcctgcgcggccgtcacgtggtgagggctccgcgcaaagcgggttaaaagtcacgaccgcggagagcccgcgagcgtcctgctggtcggtgcggcgctttccgcgtcctttaagacgagtttgaccgaggccgctccgcagttcccgcccctcggcccagctcagctccatgaacctagcggagccgcctagtaccctttctcgccgaccgcacaggcgcgcgaaaccgcgtctttcaactgacaatgaagccgtagccgcgcagctcggccactccgggcgaatcggcgcgaggccgggatggtgggggggagggggagacggttgggtcaagctccgccccagctcgcgcccctattggtgggcgcagcggttctgggcccgccccctaacggacctgtnnnnnnnnnnnnnnnnnnnnnnnnnnnnnnnnnnnnnnnnnnnnnnnnnnnnnnnnnnnnnnnnnnnnnnnnnnnnnnnnnnnnnnnnnnnnnnnnnnnnnnnnnnnnnnnnnnnnnnnnnnnnnnnnnnnnnnnnnnnnnnnnnnnnnnnnnnnnnnnnnnnnnnnnnnnnnnnnnnnnnnnnnnnnnnnnnnnnnnnnnnnnnnnnnnnnnnnnnnnnnnnnnnnnnnnnnnnnnnnnnnnnnnnnnnnnnnnnnnnnnnnnnnnnnnnnnnnnnnnnnnnnnnnnnnnnnnnnnnnnnnnnnnnnnnnnnnnnnnnnnnnnnnnnnnnnnnnnnnnnnnnnnnnnnnnnnnnnnnnnnnnnnnnnnnnnnnnnnnnnnnnnnnnnnnnnnnnnnnnnnnnnnnnnnnnnnnnnnnnnnnnnnnnnnnnnnnnnnnnnnnnnnnnnnnnnnnnnnnnnnnnnnnnnnnnnnnnnnnnnnnnnnnnnnnnnnnnnnnnnnnnnnnnnnnnnnnnnnnnnnnnnnnnnnnnnnnnnnnnnnnnnnnnnnnnnnnnnnnnnnnnnnnnnnnnnnnnnnnnnnnnnnnnnnnnnnnnnnnnnnnnnnnnnnnnnnnnnnnnnnnnnnnnnnnnnnnnnnnnnnnnnnnnnnnnnnnnnnnnnnnnnnnnnnnnnnnnnnnnnnnnnnnnnnnnnnnnnnnnnnnnnnnnnnnnnnnnnnnnnnnnnnnnnnnnnnnnnnnnnnnnnnnnnnnnnnnnnnnnnnnnnnnnnnnnnnnnnnnnnnnnnnnnnnnnnnnnnnnnnnnnnnnnnnnnnnnnnnnnnnnnnnnnnnnnnnnnnnnnnnnnnnnnnnnnnnnnnnnnnnnnnnnnnnnnnnnnnnnnnnnnnnnnnnnnnnnnnnnnnnnnnnnnnnnnnnnnnnnnnnnnnnnnnnnnnnnnnnnnnnnnnnnnnnnnnnnnnnnnnnnnnnnnnnnnnnnnnnnnnnnnnnnnnnnnnnnnnnnnnnnnncccctgcactggggatacggatggctagtggggcgccggggccatctgggttgagagagcggcgattgcggccgctgctgaggcggagactccccgccgccgcttcctccacccccagtccgccggcctcgcggcgctgagggcgggagcgcgcagagctcttccctcctcctttttcttcctcctcctcctcctcctccgggtccccgcccagcacccctcgcaccaggcggcggcggcggaggaggagagctagacccgccgccggggcacaacatggcggagccctcggccccggagagcaagcacaagtcgtccctcaactcgtccccgtggagtggcctcatggccctgggaaacagccggcacggccaccacgggcccggggcccagtgcgcgcacaaggcggcgggcggcgcggcgccgccgaagccggccccggcggggctgtccggggggctgtcgcagccggctgggtggcagtcgcttctctccttcaccatcctcttcctggcctggcttgccggcttcagctcgcgcctcttcgccgtcatccgcttcgaaagcatcatccacgagttcgacccgtggtaagtgcctcgccgcccctcccccgcccgtggcccgcggggaaccgggacccgctcctccgcccgcctgcagctctcctcgacttggccccgcgccgccgcggagccccgctcgcgtcctggctgaggccggcgcggatcccggagctccgggcgcgccccctgcccgtgggcgaagtttgccccgtgcagcctgaggcggggcgtcggggtccaggagcgaaaccttgattctcggccgggctagtgtgaggactgccaggagtgtggatgcagccgccgggagtgtgggtgcagccgccgggagtgtgggtgcagtccctcgcagcccgctttggtcgctgagtccggacccgccacgccaggagccggcaggtagctcctccgcggactgtcggtcgattccccgccctcctcgcccgctgctttcgcgttctttcatatttgcgggcgcgtttttgctagttcagacggaatcggccaggggggctgccctgttgccgctggagnnnnnnnnnnnnnnnnnnnnnnnnnnnnnnnnnnnnnnnnnnnnnnnnnnnnnnnnnnnnnnnnnnnnnnnnnnnnnnnnnnnnnnnnnnnnnnnnnnnnnnnnnnnnnnnnnnnnnnnnnnnnnnnnnnnnnnnnnnnnnnnnnnnnnnnnnnnnnnnnnnnnnnnnnnnnnnnnnnnnnnnnnnnnnnnnnnnnnnnnnnnnnnnnnnnnnnnnnnnnnnnnnnnnnnnnnnnnnnnnnnnnnnnnnnnnnnnnnnnnnnnnnnnnnnnnnnnnnnnnnnnnnnnnnnnnnnnnnnnnnnnnnnnnnnnnnnnnnnnnnnnnnnnnnnnnnnnnnnnnnnnnnnnnnnnnncattgcattagttcctttattggtctgcaggaaggtttgtggataagagcaaacagtaccacgggtgatgggagtcctagattgtaataccgaagttgcacatggtgtaagggactgacctgaatgttttaggaaattaccccactcttaacaacactagctaacttagacactacattggtctgtgaattatctagatggaaagattgctttaacttttttttcgcaacttgcccaacccgagttaggatttttccccctgagttaggattttcccctctgagagtatgccttttaaactagtgttatcttattgacctgtcaaccttgagttaatcttacttcctcacagttagacctaattaaatttcaggatatttgtttcatcatttgagattcaaagagagagagtcttttttgagagttactaactatatagataataagtgttcgggtggaggggggcagtaacttacctgtatagtaatataccagatttaagttctgcattatggagagaaaaattggtactgcaacatctattgaacaccagaggggcccactcatggacaattcaatttagatcagttaattactgtgacagtcttccatgaaatgttttcattccattttagaagttttgattttgttttctaacactagtttttttaaaaaataacctttttgttaacgtgcaatcacagaagaaaatatgttagtgtagactatttatgagcctaagaatacctgtgaaggcttattgacacaatattattaggtggtcttgttttgaaacacttaagcaagttagataaaaatgaaattggaaccagaaaatgaaaactagtatttactggacaatatgaaaagagaaagttctcttttcagattaaaatagcagaaatgcatggttgaccaaacatttcaggtaacaaaattgtgaatatttccatagtaacatttttacaaatggaaggctaacgactgtttaatagtaactctggggctgaaattaaagattgcagaaaaattcactactgaatgatgagattttggtcatttttccttaagattagaaatctgcatcaagtcagccaaagatccccactaaaattgagtaatgcaataatgaaaaggctcaacaagtaaagtggctaatatttttattttttattttttatttttattatttttttttttttagtgtagctaagtattaaaagttttctttttccagcttcagtagtgtggttggagggcataattctttttcatgcacatgaaaatatgttttggtcgggcgcggtggctcacgcctgtaatcccagcacttcggaaagccgaggcaggtggatcacctgaggtcaggagttcgagaccagcctggccaacatggtgaaaccccctctctactaaaaatacaaaaattagccgggagtggtgtcgggcgcctgtaatccagctacttgggaggctgaggcaggagaatctctcgaacccgggaggcgaaggttgcagtgagccgagatcgcgccactgcactccagcctgggcaacaaagagcgaaactccgactcaaaaaagaaaatatgttttgcttcattttttatatatatgaaaacgcatttctgacacattatcatttagctaaatttgtaccatttgaaagtatacatctctgttttaaagagctacttaatttaggtattctgcatatagttttaatgttgacatttcttaattaaatgtttatattcataatgttagataatcttgcttagtagtaaggagatttgtataataatggactgtctcctgtgccttaccgtgaatggagatttgtcagtatgaatctaatataatgtctaattcaggtgacttaatgagagaatcaggtttcagacaaaaaaaataccttgttcttgttttttttccatgtcttttgaagatctcacgtagttaggcatctcattcattcttatctgattcttacagtcattctttttgaaaaggttaaaaggagggggatgtgtagattgcctgccattattactttgggcttttaaagcttttcggggcttttaaatctagttttcttctatagctactaatagtcgcaacactttaactggtctgtagctgaacactctagtgtttctagtttgggagttgctcagatcaccatcatatcatatagcaatggcacagacctttaataatatttaaatgttactctcaggctgtgcatccacaaaccgatttattctggcctgctcataccttccctgacctctttttccatatctctatcaatggtttcatttctgcaagtcgttttagtgaagggtttactttctctgtgagctatttctttaaattttacagtagttcttaaattgtgtaaaagactcaagttagctgctgaaagtgacgtcacagagttatacttgttttttaaatttgtcacccaagttatttatcttaccagttgtcataaggggtgatgtgtgatttatttattgaagtacactgcacttttttaacatttagcaacatttttggtaacaatttgacttcactttagtaattcctcccttatcagctgagttgaacagataggaggaagcagtttgaaaatatattgtctgtacttgccaaacgtttggttaatcagccactttaacagcacttaactatacctttttatctggaacaaaatgtgttttctacatatttttattgtaagagataatacttttactttatattagccagataccttctccatatccattatcttgttcaattgtggtagcctttcccatagaagcaatgaagttccctatgtgagagctcttttttccctgccttagcaggttataaagtgggttctccctagagagaattctctgagccttaggttttggctgtagttagcaaaaatgcagcagatgcctttttgctgggcagaaagttgcaagttagagttggaacttagaatgcaatttttccgaagaaactatggtataaattggttaattagtacagatgtgttttcaaaggaatgataaacctttggaacataagctgttagaagttggggactacttcctgtactttgaggtctccatgttttccttcactttgcagatgacaaaaagaggctgttgacctcagttctgaagaagacaaattggtagccaaaccagttttagaacacaaacgtccccaaatcttaaaaagtcactttgtgggatcattagcatcagcagtccagctgcacttcagaccaggtatcactgttactgattgcattgacaattaaattgtatgaatttatgataagattggtgctactcccatttcggttgagtgtgatggcttccataagtagtaatcatagatttcatgatgtataggccctacggtagttagggtctgtcatgaatgcccttgggacttttccttccccctttatggttttcatatcgtaaaggttaacttgggtaggactgcatgccccttactgccatgagtagtttgcataaagacaacattggttataaacattagaagctcaatataaggatttacatcataatctctgacccagttgttaatgaatatgggctaacttaactagcccttctgtacctaatcaatttttatactctctataagttttgagtgtttgagaaaatgttaacatttatctttattgttatatcttagtattcgtctgtgcacacgtgctctccgaaatgaaggatggaaaggttaatattattctcaagtgaccaaatcatgtttttcccctcaatttgtttacttttaaaacttaatgatcttagggagtgaaaatactgcagttaacttgaattataaagaccccacaattcaacagacctattgctaaactattataaaaattttcaaatgcacaagaaagttgaattttatagtgaacactcatatactctaaccacctagattctacaattaatattttgctttagcatatcttcctatccattactacttttaaatcctgcttgtagacagacattgttactatgatatgaagaatgccatctttgttccccaacaccatgataaagaggatttatttctacatagtgtttgttttctatattatttgaacatatgtatatacatgctgtttcagtatcctcagagtgaagttaggatcagattccatcattccaggttttggttagcaacttacctgagtgcattgtaaatcagtgcattagccccacatctgttaaatgacttgagtttgctgaatctggtgtctcagaagaaactctaaagtggttagatggatattgatgttgatgttggttttgttaggtgtaatttatgtgaaactcctaaattccttgaattattagaaggcttttataggtcagcctgttgtctctgccatctttcatccagaggtaatggtttagctttagtgtgattgcaacagtgacttctgtaaatccctgcaataaataggaaaaaagaaaaacatttccaaatagtataggacccactgatatactatatgggccaaattaatactgttgaaaggggaaaacctgtaaatggttaacctgctactctgtcttcaaccgtctatctacctgattctggtggatgctttttgtatttaaaccagtaactcttctgagaaggcttctgttgtcctcttcttacctacttctgaccatgagtaatttctgggaatttagaaattgatagaaagtggaatactgtagggttttttgtttgtttttaaagtcgaatatattaggaggtgaggattagcgttgggggagataggatcagttgcccagaggctcccatatttaggtaaatgtatgttaatctgcatttgtaggcttgccaggaaatctaaccattatttagaattttatgtctttggaaaaatacttccatagtttcagatgaaaaacatctaaacatgttttggaatataatgtgtacataaattagtgaatgcctctttatgttgttcaaggttgtactatttgtagacaaacaaatctctaaacaattgtgactgttggcactaattgaccactctcaaccatgtctatttcttttctttctgtggaatttaatgttgcaagataactttaatatatgttctaaatgatagtagatgcttagtttttacagtgttttacaatccagtgacatcttagaattgaggagatgaggtaacatcttttatttccatagacaaaagataattcaattcagtatttcccacaagaattgaaggatacagatctgccagattccaaagtctgttcctcttaccacaccctctgcctccagggccagcttaaataaaagtgtcctctgtttaatttatgttttttattcaggtgccccaacttaagtcttaaaatactggtctatcagaatacctcttcacaatccgggctgtagctaactaagcttactagttggataatagctgattactttgattgttttgatggagcgaagagatgagttgatggttaagacttttaaccttcaattactatgggattttcggaaactctgaagagagtagctgaatgagaggaaaagatgatcaaatccaactgaatattgttcttatttagatttattttgtctataaaaagttcataataatgagattggaagtcttaagccatgccagttaagagaattgggagatggagagctgaactttcagagtagactcagaattctataacccacaggatttttagtgtatgtgttggccccctgtttctattttctaagaagctaaggaccagaaggataatactttttctaaggtgatacaattatagcttggctagattcttttccattttctttgcacctatgtttgctgtagaagggaatattttgagaagtcgtttgaaattgttacttcagaagatgaggggaagttactttctaccacttagtttaaatttacaatatcgtaaatgttgacaattcaggcttagatttggaaacaaatagagcttttgtgtgaagcttgactcatttggaattatttaaaaaaattgtgtgtactggttgtctgtaatctccataaattagcagtataaattttaaaactttattcttttttaccttgtttgctcattcctattaaaagggaaatgttactgcatgaagacatgtaaaggaattttgtttatattagtaaagtgttaaagtattaatgattagttgataaccaagttgataatattttcttttggggttttcttttcttttttgtttcatgccttacagatttattagctgttctcaagtaaagacttttctccccagtatggtattcttttctttggtgatatctagctatccctgcaacctataaaatccttcaaatgcattgttttaaactttaaatattggtgctttgtttcactttctgtcccctgcctccccgccccacaatagatagataatgttgtagcgtataagatatacatatatatacaaatactaatgttgaaggtaaaattttatgttgttgcccatactggtaaaaaaattaaaatgtagtgtgatttttcaaaattctagtatatccacagcttaaattattgtttgttgctgaccaaatttatctttaggagaacacaggccataaggagttggagaaaaggatcataactggaaactcacttgtgaccaccatgcctaccacacgtttattatttgatgcctattcttaaaataccagtaacacctgtagactatacccagtttaagaaggtttattattaaagtaaattattatacatcttatttatgtaacccacatcagaaatggagtacagaactatgggaggcagcactcttgtccagttatattctttgaaaataagtcttaaatgtttctataaacaagagcaaagaaatgagttctgcaaaggatttcattagaggagaaaagataattcagtttcagtttttaaagcaattttcttttatgatgaagtatgacgcatcctgaaaaatataaatctaaagtatagtgaacacccatgtgactattacccagatcaagatcattgccactaccttagacgacctggtgtgtttctcaatcccttccaccccctgactttatagtgatgacatccttcctttttctcataggtggtaaactctgtgtgcattgctaaacaatacaatttagttttgcctatttttaaacttcagataaatggaattgtggcttttgtgtctttttttttctttttttgtttttttttttttttggctgagcattttctttaagattcatccttgttggtcaaaggattgttgacaatatgtacgtaagtaataaagttcagcaataatttttttgtttgtttgtttgttttagatggagtttctctctgttgcccgggctggattgcagtggcgcgatctcagctcactgcaagctccacctcttgggttcatgtcattctcctgcctcagccttctgagtagctgggactacaggcgcccgcgaccatgcccggctaattttttgtgtttttagcagagacgaggtttcaccgtgttagccaggatggtctcgaactcctgacctcgtgatgcaccctcctcggcctcccaaagtgctgggattacaggcgtgagccaccacgcccggcatttcagcaataatttggctaaccaggtgtcttattcacctgacggggttgcctgttcttttatagcgggaggtgcctctaggaaagagaaagggaaggtatttttcttttcacttgagatttaaaaaaattatctcaaggctgaacccttgaggtggagtcatccttgactagagtaactttgacaactttgttttaaggtactaattgtccagagatttaatttttctacagaaaccaaaaatacaagaaagtgggtgggagagaagagagagacatcgtctttaaggagacaaatgataatcagataaatgcaaaatgactggttttaaactatggctttttgtcaactattaaagtattgtatattaaaattggcataaagaaggcattggttgcttgatacttcttgaaagcaggaaagagaatactggaactggaggtctgagctgaggaatttaggaaaaccctgggcatggactgtttgctgtattgatatatttgtagagattgtcaatcctggttttgaggtattttgttgtttatttgtgtagatgtagcaattttgcatatattgcatttctgtcatagttaattctttgttgaagaaaaatttaaatctaggactgtctttcttcaaactctgtttagtcagccagtatttctacagaattcaaacttaatatttaaaccaagtgtcttagggtgggtatacgtactgtatcccatcttcacaaaatcccatgtgtacctgccagagagtaatataaatggctcaaattaggctctatttggatgatggtccaactgagtgatttaagctatttttaacgcctctagtgtatttcttgtagaattcctcaaatggagattcttttctgagatatattgactgttaagaaaaattccaggctggctgggtgtggtggctcacgcctgtaaccccagcactttgggttacacgagggtggatcatgaggtcaggagttcaagactagcctggccaacatggtgaaaccctgtctctactaaactacaaaaattagctgggcatggtggtaggcacctgtattcccagctgctcgagaggctggggcaggagaattgtttgagcccgggtggcagaggttgcagtgagccgagattgcgccactgcactccagactgggcaacagagtgagactccatctcacaaaaaaaaaaaaaaaaaaaaagagaaagaaataaattccaggcctacttctctcagaaatcacaattgatcatctgtgtcttacgtgagaggtctaggtacaggttttattaatacaaaacaaactaaattttacttaggactgtttatttggctaactaggccagagccattttgaagattttaacacctgtgcatgtaaaaacactcaaggagacttaagttatttgttctttgccaaagttggtaaggtactgttatgattatttaaattttggtgctcatttttcctctaatgaatataataataacttactactattattgtagggaggcaaaagattctttaaggcaagaacatttttctaatctttctagaatatcctacacagtattaggaacatagtgagtgcacagtgaatattaagacagatcctttatctttaatggtaaccacattttatgttttggtcataatagtaatagtacagtaagtctctgttgtgcaatactttgaaattttggatttgactgtgatgtcagtaagatcacatgtgcagtgaacatcataatcccagtttcaatacacatgtcatattattctttatagaagaagggaagagttgatgaagaaaagggataatgcttatggaagaaatggtatatgtgagcatcatgacagccatcaacaattgggagatgaatggctggatggataacttaggaagaactttgaggaagattttagtttcttgagtatttcttccaagtacaagtaactcttacagaggtctgtctccagtgttaactcactagttagggaacattgaataagagaagacagaccagttaatatacaaaaaccatatgagttatgaaagttttattatttttcaaatgagaaatgaaaaaagacagatgacagcaatagaagtaaaattcacaagatgccattttaattgaacttgagaaatatattctgatacgaaggaatagtaagaattgaaattatcattgcatacataggcattagttagaatatactaaattcatgcacatgatgaatttgggtggggttggattaatgattcatttggtttcatggctcttgatttaactttatgattatagttaattaatatgcaaattaagcaacactttaggaaaccatcacagctctgactgatctcatttaaactttcccataagaggttaaaggatactaaataaaaatactcattagggataaaataagttgcttgtcttcattaaagtgtctttgcaatggaaatagctttgttcttgtctaattactggagaggatcattgaatattgtagatattgtgggttaaataaaccagataaagtctttattttcttttattatgcattgaatcctgacaaaatggtcagctctttagttatagaatcattccatgtaataatggcagtattcctgtgaatcctaaaacagtatgctgtaatgatctcacaagatgtttttgcttttaaaaatgtgtgctgttttaaaaacaaatctttgtccatcagtgtgcctttaaaaaaatctattacagtgagcagggtttgttgaagacattgacacttaaagcatttgcacggggcgcggtggcttatgcctataatcccagcacttgggaggccgagataggcggatcatgaggtcaagagttccagactagccagtttgagaccagcctggccaacatgatgaaaccctatctctactagaaatacaaaaattagacgggctgaggcaggagaattgcttaaacccaggaggcagaggttgcagtgagccgagattgcaccaccgcactccagcctgggtgacagagcaagactctgtctcagggagcggggggggaacattgcatatgctcttaatttttaaaatttaataaccttgttccatataagtttaattgcaatcccaagatgatttttactctagaccatcgctaaagaaggcttttattttaatatgctaagcagctttatggcatttgaaggaacaggataatgaaactgtgaagtagatgaaataaatctaatcttaaaactgtaaaggccagtcataagtcatgagtttgaggagcaactaaaatctttttaaataaggatttttttctaaagttgttaaaatgaatcagtcacttcattagaaaggaagatcttttcacctgtttaaatactttattttggctgttaaaataatttactgcatttcaatgaagtgtcaaatagaaacagctgttatatgaaaggttttccttttggaataatcattctggacatttgaaaagagtatataacattaagtgatgttataactgtgtaagaatcacaacataatatacagttataaataaattttaaataaattgaagtatatttaacatacaacttgcatatataatgggctgtcatattctatatataattataaaacttaatgataaatacttgtgaacctcctagccaaccacaaaaccagaacattaccaattttacatctggctgtgtttcttctttagcctgtcccctacattatgctgaattttgtttaacgtttcccattgctatcttttaataaaactctcatatgtatatatctgtaaaccaagcttgtccaccctgcagcccagagcggctttgaatgtggctcaacacaaatttgtaaactttcttaaaacattaggagtggttttttttttttttttttaagctcatcagctatcgttagtgtattttatgtgtggcctaaggcaattcttcttccactgtggcccagggaagccgaaagattggacacccctgctgtgaaaacaatatattgctaatttttgctttgtttggagcttaaaaaatggtattagcttatttatcctcctctttgactttcatttatacatctgttagttgacagacatttgaatatccagttttttttctattgtgaaacatgctactatgaacattaaaactgttttctgatgcatatgtgtggatgtttgctggggtatatacctgggagtgggattttgtcaaaatatgcttcagttatttatgaaaatataccactccaaaacttagtgacaaaacagcattttattatttcacaattttgtgggttgagtggggagtccttcagcttcatgtgtcagctgaggtgctgagatgattgtagtcacctggaggctcaataggctgtagtcagctgggactagaatgtttgggatgcctggacagctgagagtcatctggaatcttgttccattgggacctcagctggggcttttggctcctccatgtgactgcttagtctgcctcagcattgcagcggggttctgagaaagaacatttcaaagggggagaaagctgccaggtcaactaagggttaagcttggaatagacacaagtaacttcagctatattttgttgttctcaaaatacacacagacctagctcaatgttgagaggagatgcatatacaggtaggggcagaattgtttaaggtcatctttggaaacacttaccacaatgtgtttatcatttttatctcccgtaaaatatctgttcatgtctctcccaaagttttagactgggttgtttagtctcactaatttagtaggaggttatatgtatatgtattttgcatcctaagtctgggttaaatttgttgcagatatcttattccagtttgtgcctaattggtccttaaagcaatcctattagatattttattgcccccattttacagatgagagagtactgcttagtatgttaaaaggaaaggccttgaagtcagcctccagggtgacatttttgttacaaagaatagcatttgcaaaggtgtacaattatgaatcagcatgatgctttgctcaacctacctgttgtaccccttcccctccaaataattgaggcttggaagaatttacaagtatttttatttacttataaatttttatgtaactgtgacttttgctatgagtggactgaggacgtttgatgtgagaggacttgcctggagtgacagagtaggcagtaagttcagccccaagttctttctagtcttatctgccctccttattcctcaattttttttccctaaattattcgtttggatcaaccaggttctgccagcatattcaaaatccatcttaaatgtagtggcgaaatattttgcaaaattataatagaagccagagatttataattaatattcaaatgtttgcattatatactttaaaaagaacattgcaggtcgggtgcggtggctcacacctgtcatttccacactttgggaggatcacttgaggtcaggagttcgagaccagtctggccaatatggtgaaaccccgtctctactaaaaatacaaaaaatcagccgggcatggtggtgcatgcctgtaatcccagctactcgagaggctgagtcacaataattgcatgaaccctggaggcggaagttgcagtgagctgagatcgtgccactgcactccaacctgcatgacagaacgagagtccatctcagaagaacgctgtaggcacgcatcaagtacaactcagttggtttaaactgaaatgccacagaacaattctgaattccaaaatgcaaagctttggataaaacagcctgaacaagtacaaaaagacaataaatttgtagacacttcttcccaaccttcaaattaggaagatttgttctgtgtaaaagtatagtttctgatccttaaaattctatgtgttgaaggcacctcagcatatctctgcagtgtaaaagcagtgcttcaggcagcatgacttattttcatgtcacctcagatttcttggatctaatattcaaagacagagtggaaataataatacttagtggaaggattcttggacatgtaatgaaatgcagagcatcttgagacttttgaccaagtaatgtttggtcatttaccttcctgtttggttggaacaggagtggtgattccagccattgcatgattgagcctcatttgtttttattctttcctgccccgaattcttccattttaagtgtcttaaagaggtagttattcttgcctaagaagtaaactaaagtataacatatttgctataataatgctgatataatgttactgtgataaagtataagtgtcaagtagtttggcaaaaagatttcaccaggttgagcatagtaacacagggaaaatgagccatttaaaacagggaaaaaaaatgtttctgtgaaaccggggagaaaaaaacagccatttttttccctgttttacaaatgactcatttgtaaaatagggaacaaaatgagcccatttaaaatttaataaatgtatttttaacatttgtattctcaaaataaattttaaaatagagtataccaaacatgctattctctgaggagtttaatgcatgttattattttacagaaatttaagttattttaaatatgtaaaggatggtaaagcttccctatagttcagtattgaccacctctcctcaacctgtctctaaaggtaggagaaaactgatttattctccttgtattctcttctttctctgctccgtcattagtttgctgatattttctgttcggaaagggggtgaagaaccttcccccctttgagggagataagttttggtttccctgtaatatggaacaaacttcatacctggcgagcacaaagaaattattattttgccaaagtatgttctgcagaccacatattccagaaattacacttctaagcaaaataatctttgataatttgaatttgggaaaaaaactgcttactacattctttgatactgatatgcaatacacattaccatgttacagtcttaagaagttgttcagttaactgttaattttatttaatctggtatttaccgtatttaatttatgaatcactgtaagattttaatttttttttaattaatgttccatgcaattcatggaaaagactgatgtagatgttttatttgatagatgaggagcctgaggcctaaggctaagtaactttaccaaagtcgtagagataataaaactaggactgactttcttcagtgttttaaatctttttatttgtttatttgaattactgcattaggaacaagtatatccacattaggaacatactttttttttcaaatgggacagttgagtatctgctcattgatagcatcccccctgattctcctgatttgtcttggtgactaagttgagtattataccactaacttctatgatagttaagttctcaggcctgtatacattgcttattttgagtgattgttttattttagtttaccttgtgctgttgctttccaccgagactgtcctcagaaagttggtcattttgcttatgagtttattagttgtccaaccactttggctctttcatcacaccaacttgtgggccatgggatattattactatggataatgcttgttagttatacattttatatttatagtatatgactatgggtctgacttaaacgtgtattatgtatttctatatctaataattgttagaaatcctctttatatagtataatgcataatcatatgtctaatttagataatatctagtaacaataaagaaatgtaaatataacatgtttacatataatatttattggagatttgtttctataatatatgaatagttatgccggacttaaatatatgttatacacgttgtgcgtgcgttatataaagagaaagaacacttgtgcccatcccttctgcctacattatttagatttccatctctattgggcttagctgagcaaagtgtcaccggatagttttaattgatcaaatatactattttgtatgtgatcttagatttttttttcagatttttttagtgccattaaaatgctctaacagcctcttattttgttgtaattttttttgttgtcagttgctttttcttttttccaattagtttagtaaatgtcctttataaatcagaatagaccctcctttttcaaatggatactgataaaaattgacagctgtcactgccagttaaggcagaaattaagagatggtactaaaataggaatcctgttttcagttaatgtgtgtttaaaagttttgccctgtgtgttcttttttgatttgcacatgcatctgactttaaattggaagatgcagagtagctctaaggagtcttcaagacatttttgcagcctttaaacaacctttggttttctctctgtgttgctcaaagtagagagacaggtactttgttatctgaagcttatgacatgctctctgcttcaatcaaaatgaccacccatcagttgcaagagcagagagagaggtttgtgagagtagtctgagatccagttgcaactgtacagtgtcacatttatggtggtatgacatttgtgagtctttcccttcagagttaacctagtaaaaaaagttattctcatatatcattagtaatccttatgaatttctatcattgttttcctgctgttacttaaacactgataggaatttatgtaatcatattaggcttgagcataactctctcatgagtttccatattttaagttataaaattggctatgtttaatgtgattatctagacagtgctcgtgtgtatcacttggtgagattgaatttaggctgtttttttcgttctattgaagggggattttttttttccatgtgttacttttaatagagttcatcagtctggcatccttttgtttttgatcctgccactagatggcaggagcaataaaaggtagattgaaatgccaactttagttggccttagctgctttgtactttaccttggttgttctctgtccctattagtgctgaattttgggtatatatgaagtgttgcaaatagtggtacttagtcctataagaaagatctggtaccttatatagcctgagagggcctactaatagggtaaaggagaaagaatagaataatccttgaggtgttctaacactttgtcttttgccttttacttttctatttttcttctccctttgttgaattgtactcctttcctttatttcctgattgtggtttttgggtgttttttgtttgtttgtttgtttgtttgtttggtttttgatagggtcttgttctgtcgcccacggtggagtgcagtggtgtcatctcggctcactacaacctccgcctcccaggctcaaatgatcctcccaccttagcctctcaagtagctggcactacatgcgcatgccaccacgcctggctaattttgaaaaatttctggtagagacaggttttgccatgttgcccaggctggtcttgaactcctgggctcaagtgatccacccaccttggcctctcagagtgctgggattacctgcatgagccactgtgcctggcctctttcctgattcttttatgcttacgttagcatccataattggtcatttctgttggtggtactagtcgctttctcatttaccgttcccacgaatacatgttaacttggccagttttggtagtcgtatgtgtaacaacaaactgttataggtggctttgtaaatctttacagaaagggttattttcaagagagcctgttaattgatagtctttgaagaacagagtgatagacagagtctagggtgatgggatgttgcttccgtgattatgtgacgttgtgtaaaactttgtcttaccagtagacttgcaccagagactccttgctggcattataagataagcagccctgttagggaagcctatgtggcaaggaactactaacagcctctatgatgtttccaccaacagccaggaagaaaccagggcccctcagtcctataacctcaaggaaatgaattctgctagaagcctgagtgagcttggaagcagattatttccctaatttagcctccacataagaacccaaccctggtgacatcctgatgtcaaccttgtgcgaccctaaacagaagatccagctaaactgtgcctagattcctgacccatgaagctatgatagaattagtatatgttggtttaagccactgagtttgtttaaaattgctgtataagcaataggaaactaatacaaatacccttcgtaaacctttctttccatctctgaatgttactacctaacttctctctgatctcatgtaatcaaaaaatattgattgaatacctcttacttgccagggactatggctacagtattgtgaacccaaatagacatgattctagtttagtgagggagttagacttgaaccagtaagaatgaccaatgctgtcaaggaacatgatacaatgagagcttataatagggagataaactaaacacattgtctttttaggaatccttatttgacttttaaaaacttatacttactacattgctttcttacctttttttttaaagcatatttctgccatcacaaaacttgttctatctttattttctgttagcattatgaaaactacctatgtgtattttttaacccttacgagtgttctttcctctctcaagaacacttctcctcttttcctgcctttttgctcaataattcatccaggtttaagttagatgtcagttgtagaagccatccacgagtcctttggacagtaagctttgtgaggacaggtccgtcctgtttgctagtatctttagcacccagtgtgatacataagataggctcttaaaaccaaataaggccgggcacggtggctcacgcctgtaatcccagcactttgggaggccgagacgggcggatcacgaggtcaggagatcgagaccatcctggctaacacggtgaaaccccgtctctactaaaaatacaaaaattagccgggcatggtggcgcgtgcctgtagtcccagctacacgggaggctgaggcaggagaatggcgtgaacccgggaggcggagcttgcagtgagtcgagatcgcgccactgcactccagcctgggcgacagagcgaaactccgtctcaaaaaaaaaaaaaaaaaaccaaataaaacttgatagggaggaactggaactcctgtacattgctgatgggagtgtaaatggtaactattttggagaactgtttagtatttcttaaatacgtgtctactatataactttggagtggaattgctaagtattcacccaaagaagtgaaaacctgtgtccttaaaaaaggcttttacaagaatgcttgttcatattttataagaatgaatgtacagccttattatttcctcccccggaaacaacccaaatgcccttcagaaggggaatggattgtagtatgcattaaatggaatactactcagcagtaaaaaagaataaactgttggtatatgaatatatctcaaaaacatgttaaatgaaagaagcctgattcacctttttaaaaagtagaattacgattattccatttatctgaaatccgagaacaaacataatgaatctatggtgaaagaagtcaaagtatgcttggaaagaagtgcctaaaggtgcatgtgggaactttcatcatgagggtgatgttatgcatacagttgtcaaacctcatctaatgaaacatgtcaattggtgtattttaaagcatctaaattatactttagattttaaaaatgaaaaaaaatgagcgaagaaggtatcctttagtaccccctgggttctctgcttaattatattttcttgttgcctcttcctcctgtgagattgtcagctctgtgaggtcagggaccaagtttgcctgtggttcttagaattgtgtacttgtatgcagaatgcccaagtttattggccctgaagtgaatagttatttgagatctataatctattcatagattatatccatattttatggctgcatttttaagaaaaatatttgcattattacagaatcttacattcagtgtttttctttatgtagcttctagctttttctgttctaggattcacaaaagacatctgtttaagtgttggtagagtagtcttgctccaactacaattttgccaaccacagtttgagatagcacagtgctatatttgtaaaccaaagtttaaaaatcagattttaagaaacaaattgtggtttattttattctccttaaaaaaatgaaaactcaatattaatcttgttttcttgtgaatcccttcctgccagttcttaactttttgagccaatggaaaaaatgagccttggtcatttaatctttttgatcaaaagcccttaaacaccagagtaatttgaaaaagaaccaggtggttacatagctttttgtctaactagtactatctctcgttgttgttgtttgtttttgttttgctgttttgttttccctgatgaaaataatactaaattttaaatgatttaatggccgtgtcaaaaacttgaaagataagtgtgtagatagtctgaatttcccaaaaccgcgtcagcagctccaaggtgtaatttctctgaaactttaagaaggtaactcagagcagatttttcagtgctggtgagttttaatttattcatcaagtagatggctttttattgtgatttatgttggaggtcttctaaaaaataattttgaaattctgcaaaacttttatgcacacttttctggtaagagaatccatattttcatcagattcttacagaccctcacccagaaagattaaaaaccctgcctttacctctattttctctaagatttttattttgccagctgctggttttgccaactttaagaaacataacagccctaaagtcaacaagaatttattctatagtgattgtttacctatattgaccatcagtatgtatttgatatgtttgttgggtctgttttcttcatgattgtttttactctctttttgaccttcttgggtgcagaactggatcataattactggattccactgactggcctctctgcctctgtgttccaaaccattccagacatataagaatgatgaaaaagaaatattcccatcagcatacctggtttttgttttgcaacctctggttagaatatacttgttctcaattatagtaccaattttgtggggaatatatatccttcttggcaagatgtttaggaatgccaaaatctaaaactgtgtggctgcatgcatatcctgtcacctgctcacttactctgtgctgcctctatttcaaatcctcttgttattcttgaggtggttcctagctataaaaacctatgaaaagataaaaataacatgattcttgcaaaaaattgttaggataagctttatatttaaagaaaattcatgagtctgcattttgatatctgtattctattttaagaacactgttagatgttgatacacttaatcaaaacttaatttgattaaggaaatagcgttnnnnnnnnnnnnnnnnnnnnnnnnnnnnnnnnnnnnnnnnnnnnnnnnnnnnnnnnnnnnnnnnnnnnnnnnnnnnnnnnnnnnnnnnnnnnnnnnnnnnnnnnnnnnnnnnnnnnnnnnnnnnnnnnnnnnnnnnnnnnnnnnnnnnnnnnnnnnnnnnnnnnnnnnnnnnnnnnnnnnnnnnnnnnnnnnnnnnnnnnnnnnnnnnnnnnnnnnnnnnnnnnnnnnnnnnnttattttattgatatataatattttacatatttaatggtgtacatatcatattttgtagcatacatagaatgtgtaatgatccagtcaagttatttaggggtatccatcttgagtatttattatttctacgtgttgggaacatttcaagttctctcttttagctactttgaaatacatagtaaattgttgctagctatggtcaccctactctgctatacaacattagaatttatgccttgtatctaacagtatttttgtacccattgaccaatctctcttcatctctgcttctctcctatccaccatactttgcctagcctctggtatctgtctacctcactgagatcaactttttttttttttccgttcccacgaatgagtgagaactgtgaaatttgtctttcagtgtctggcttattttacttaacataatgactccagttccatccatgttgctgcagatgacatacttttattctttttatggccaaataatattccattgtgcttatataccacacttcctttattcatttgtctgttgatggactcctaggttgattctgcatcttcgctgttgtgaatagtgctgtagtaaacgtgtgaacgcacgtgtccctttgatgtactaatttcttctcctttggataaatacccagtagtggggttgctggattatatggtagttctatttttagtttttggagaaatctccacactcttttccaagtggccatataatttatgttcccaaagcaatgtataagagttctgttttctctgcacccttgtcagcatttgttattgtctttttcaataatagccattctaacttgggtaagatgatacctaattgtgatttttatttgcatttctctgatgattagtgacgttgaacattttttcatatgcttcttggccatttgtatgtcttcttttgagaaatatctgttcatgtcctttgcttattaatgtgatgatgatgatgatttactgttgtgtgagttctttctaggttctgcatattagtcccttgttgaatgaatagtttacagtatattctgtctttcagtaggttgtgtcttcactctgttgattatttcctttgctgtgcagagttttttggtttaatacagtgccatttgtctctttttgtttttgttttctgtgcatttaaggtcttagcataaaatctttgccttgaccattatcctaaagtggttttttattgttttcttctacttttatagtttgggatcttatgtttaagcctttaatccatcttgagttaattttgcataaagggagagagatagaggtccagtttcatttttctacatatcgatatnnnnnnnnnnnnnnnnnnnnnnnnnnnacatatcgatatccaattttccccagccccatgtattgaagactatgtcctttccccagtgttcgttcttgaagccttcgttgaaaatcagttggctgtaaatatgtggatttacttttggattctctgttctgtgccattggtctgtgtctttttatactaaaaccatgctgtttgggttactgtagtcttataaaatcaggtagtttggcctccagctttgttctttttgctcatggttgctttggctattctcactcttccttggttctttattaatttcaggactgttttttctatttctgtaacaaatgacattggtattttgatagggcttgtgttcaatctgtatgtatactgctttgggcagtatgctcattttaacaatactaatatttccgatccatgggcatgggatgtctttccatttgtttgtgtccctttaattcttttatcattgttgcgtagttttccttatagagatctttcacttcctttgttaaatttatttctaggtatatatatttttatttttatttgtttatttatttttttgagacggagtcttgctctgttgcccaggctggagtgcagtggcgcagtctcggctcactgcaagctccgcctcccgggttcacaccattgtcctgcctcggcctcccgagtagctgggaccacaggcgcccgctaccatgcctggctaatttttcgcatttttagtagagacagggtttcactgttagctaggatggtcttgatctcctgacctcgtgatccgcccgcctcagcctcccaaagtgttgggattacaggcgtgagccactgtattttttatatctattgtaaatgggattgctttcctgatttctttctcagctagtttgtcattgacatataaaaatgaatcagtacatgatttttatatgtcgatttcgtatcctgcaactttactgaatttgcttattagctctaagagttttttggcagagtcttttggtttttccaaatataagatcaggtgatatgcaaagtgggacagtttagctttctctttttcaatttggatgccttttacttttgtcctcttacctgattgctctggctaggatatccagtagtatgttgaataggaatggtgaaagtagatatccttgttttctagttctttgtggaaaggctttcaacttttcttaattcagcatgatgttagctctgggtttgtcatatatggcgtttattattttgaggtgtgttttatgcatagtctgagagcttttatcatgaagggatcttgcaaattcaagattaagttcaaaattaaaaaatcaaatgttttctccttattgagatgatcatagggtttttgtcttcattttcttgaagtgatgtatcatatttattgatttgtgtctgtcgaatcatccttgcttccctggtataaacccatttcatcatggtgtattatctttttgatgtactgttggattttgttgagaaattttgcatctgtgttcatcaaggatattggcttttagccagttgtagtatccttgtctagttttggtatctgggtaatgcctcatagaaaaagttaaggagaattccctccccttcagttgtttggaatagtttgaggagaatagatgtgtgtttttccttgaaagtttggtaaaatttgacagtgaagccatcaattcctggacattttttgttgggagaacttctattactaattctgtatcattactcatttattggtctgttcaggtttttttttttttaatttattcttgattcaatcttgataggttatgcttatccagaaatttatcagtttcctgtaggttctctagatagttgttcgtagtagtctctgatgatcttttgtatttctgtggtactaatttgtagtgtctttgttttcatttctgattatagttgggtctttctcttttttcttggttagtctaggaagtgccttattggtttttttttttttaaatcttttcaaaagaaccaactttttgtttttgtttcattgattcttggggtgtgtgtgtgtgtgtgtgtgtgtgtgtgtgtgtgtgttgtctctttcatttagttctgctctgattttcatgatttctttgcttctgatttggggtttggtttgttcttttctagctccttgaggtgcattattagattgcttatttggagtctttgtatttttttttttatgtaggtgttgtttattgctataaacttagcatggtttttgctgtttcttataggtttgggtatgtcatgtttagatttttgtttgttccaagaaattttttttattttctcctttaaaattttttccttcacccagtggccatttgggagcatgttgtttaagttccatgtatttgtacagttttcaaggttcctcttgttattgatttctcattttattttgttgtggtctgagaagatacttgatattgtttcttttttaattcgttaagacttgttttgttttctattgtatggtctatcctggagaatgtttcttgtgctaatcagaataatgtgtattctgtagctgttgaatgaaatgttcatgtcaagtacattttgtctaatgtgcagtttaaatccagtgtttctttggtaactttgtctacatgatctatctgatggtgagagtggattgttaaaagtccccaactattattgtattggaatatatctcttccattaaatctagtaatatttgctttatatatctgggtgttccagtgttgggtgcgtatatgtttagaattgttatttcttctagttgaatccacttatcattatataattaccttctttgtctctttttactgttttttgacttaaagcctgctttatctaagtgtaggtactcgtgctcacttttggtttccatttgcattgaatatctgaatttatttccctttactttcagtctatatgtgtcttcacaggtgagataagtttcttgtaggcagcatatagttgggtcttttatttttttaattcattcagccagtgtatatcttttaagtggaaagtttaatccatttacattcaggattattattaatatgtgggggtttattcctgtcattttattaattgatttctggttattttgttctgttctttctctcataatttatctttgtggtttggtggttttctgtagtagtggtaacatttgagtcttttctttgtatgtgtgttgctttgccagtggtttttatatttttgtgtgttttcatggtagtagatattgtcctttcacttccagattaagtactcccttgagcatttcttgtaggctagtgtagtgattatgaatttccttagcttttgcttgtctggaaaatattttatttctccttcatttatgaaggataatttgctggatatagtatcattagcaatttttttttctttcagcactttcaatacattatccctttctttcctggcctataagtttctgctaagaaatcttttattagtcttatgggggtttctttataagtgactagactcttttctcttgctgtttgtggaattctctccttatgtttgacttttgacagtttgactgtaatgtattgtggatagaacattttgcattgtatctgtttgcagatttctgagccttgtgtctctggatgtccaaatctcttgctagacttgggaagttttcatctattactttgttacataggcttttaaaatcttttgttttctcttcaccttctaggacactgaaaattttaatatttgttcactttctgttgtcttttatgaagactttgttcatgtttttaaaatttatttctttatttttgtctgactaggttatttcaaaagacttgtctaagttctgagagttttcttctgccccatctagtctgtcattgaaggtttcatatatattttttatttcattcaatgaattcttatgttctagaatttctgtttggttcttttttatgatatctacctcttgagtaaatttctcattcatatcctgaattgtttttctgatttctttatattgtttttcagaattctcttgtatcctactgagtttttttagaataaataatttgagttctttttctgggattttgtgaatttctttttttttcaaaattttttattttttaaaaaaattttatgggtacatgataagtatgtatatttatgggatacgtgagatattttgatatagacttacaatgtgaaataagcacatcatggagaatggggtatctgtcccctcaagcatttatcatttaagttacaaacaatccaattacattcttttttttaaaatatacagttaggttattattgaccatagtcaccctattgtgctatcaaataggtcttattcattcgtgctggaatttttttgtgtgtgcccatttaaccatccccacctccccaccaaacccccaannnnnnnnnnnnnnnnnnnnccaccaaacccccaactactcttcccagcccctgttaaccatctttctactccctgtgtccatgagtttgttgtgaatttatttttttgattgggatctgttgctggataattactgtgttcttttggaggtgtatcatattttcttttttatgtttcctgtgtttttactttggtatctgcacatctggtgtaatggcattttttgacattgcttttgttggagagaattttttcctgaagatatatgtatggtgttggttggatatggcactttggtattgattctgtgtgtgtgtggtagtgtgtagtctccatatgattttctttttttctgtaaacagcattagtgtgtctgtgatttccccaggggcttaagatgtggttgttagtggaggctgtggtgaagttttgatggggtcagggataccaggtgtaacagtcttttggacccagtggtggcagcagtgaactgagcatcccctcagtgttttggcccgagggcagcttatgccagtgacagcgttcgtgcatccaggctgattttaggcctccaggtggcctgcttaggtgctgggattccagtggtgggtcatgcaggggagggcagcttctcgagcccctgggcagcaggtgtagcatgggtgattgcagtagcagcggtggacaactccctggaacctaagtgtctgtgctggtattgtggtggctgcaatgagttgtgtgggctggtccccagacctgcaggtgatgcatgagtatgggtcctagctctgctggtagtggcaggttaagtgggcctgacctcagaccctgggagtagtgttcaggtgtcactggtggtggacttagtgaggtgatcaccagagatcatccacaccttggattgtgtgtttgggtacttgctttggtgggggtatggagctagctgggtggaccggctggcagtggtaggcaagggaggggtgatccccagtttgtgggtggaatgctcaggaggggccagcagcaactgcattgcaaccctgctctactagggaaggtggggttgctttccttcagagtagctgtaggctggcaacttgggggcggggcatgggtttcctgccttggctctgcagcagcctgcagccctcaagtggctgtaagcaatggaatttgtccttagcgcaggtaaaaattcacagtcgccctctgctggggtgggcagtatcgctgccttgtagtggccctggcagcaggatgcagtttaatggggcctgtgttctcaaaatggcaccatgttgtagctgcttaggttcgagtgattcgtgggatccagcatgagctgtctctctggagcagtgctttcgcgtggacttcaggcagctccctgttagtcttgggacctgagagggtcaaggagctctcctgtggctaggattttaggagtcctagtggttccagtgggaatgtagaccttagggggtctctcaccctttttctgcattataagccactccagcctcctacctgatcccagccgaacaggcttgtttccctctttttccttgcttttgatgcttcccatcactactctcttgaatttcattgttctctctcaggtgatcttttttactcgctattgtggttcctctccatagatgagacaagtaccagatacatttagtcaactatcttcagcattgatttttattggttttgattgcttatctaaactagtagagcaaattattttagtatgcatggtgagtgcctttaacattcagtcatttaacaaatatttattgtgtgataactatgtgccagacacagtactaagcatttgggatatatacaaggatctttgttgtgatggagcttatttttcagataggcaagcaaacaagtaaataaaaagatcaagataattttagttagtgataaaggctattaaaaaagtaatatgctaactagtgtttgatgtgtttgtagaccatggctatggggccactactgtagattgagaagtgaaagaaggcctttctgagataatatttgaactaaaatcagaatgacaaggaattagggccctgcaaagatctgggttaagagcattcctcttagcagataaaaagttgatatgttgaaggaacagatataatgcccctgtggccaggatagagttagaaaagtggtgtgaatagtgttaggatagagccagaacaagtgctgaaattggtaattgtggaaattagacccttattcagacgttttttttgagatggagtcttgctctgtcacccaggctggagtgtagtgggcgcgatcttggctcactgcaacctccacctcccgggttcaagcaattcttctgcctcagcctcccgagtagctgactgcagcaggtgttttccgtttctgtatacaatactaaatggttctgtgagtgactgttgatgaaagacttcagaggccagaacatgaaccgggacccaaacagcattgaatatcaagtatacgggagtattccctgaatgaaaatttaattaaaccagttacactattttagtgccctctatctgaatagtatatttctatataaaaaaaatagtttaccttagtaaagtgggaatgtttaaacatttcacatcatttacaacctcacactggcactaaatcactttgctcgggcgacagttgtgtaaaaatgctttaaaattgggtcatatataaaatagttcagaggagctttaacacatattttattaactttactatatataccaggcaccgtccttggtgctaggagttggaagattgattccttcatatttgcccagaggcaaaatgatgtgaaatagacccctggctttgctgctttgacttgtctaaccttgagtaagagcaggttacttaacctctttgtgcttccatcttctcatctgtaaatagggaatgacaataatatacatctcaataagttgtcataaagatcaaattattaataacaaaggtatttaaggcataataaccactcataaaatgttaacgatttattgattttgttgttttcattattctcttaggctgggggtttcttttctcaaggaccttccaatccagtggaggagacaaatctgtaaatcaatgctatttcgtatattagattggaaaaggtagaatgcaaggtgcaaagttcatcagggttacgtataaaggaaggattgccaataaaaagtaaaatgagattttttaatttcagtgaaagaagagaaacaatcatactttaaattcctgggggattagaaagtacctgatgaccagaaagaggaagagattccgaaccaattgttaaactttaaatcccataaataatttattcaaatcaaaataccaatatataataattatggtgataataatggaagttctgtatctcttggaagatgttgcaaataatggacaatagaaacaataggcttaaccttttaacatgcctgcctgtcttctttccttccttgcattctctcattctttctttttcatgagaaattggtactttgctttctctcagattagttgttgatccatgtataacgtgtattacaaagatgaactggcctttttagaccaaatagaaattcctgtttcttgtttttatatctcagagttgtaaaagcaggaaggaaaaattatgtgagaacaaatgcttttccatttcttcattctttttgttacacttagtattcaaatgatagcaggcagacattatatttctcattggacaatctcccaagtagttgtgtaacattatgtgacaaacttggctgtgatcagaggagggattgagataaaataagcatttgttggttgaaagaggaaggaggtgttgtacatttttttgataatgaagtgtacacatacttactcataaccttgtaagaactaaacttcggagaagtaaagatgacaaattatagcttactgagaagagttcagttatctgaagattgacagtggttgaattggttaatataagaagtatgagaaaggtgccaaaaaggagagaaatgtgagctagagatagggactacttggctttgtttctttgtgatagtcacacttattggaggatttgtttggtaaaaccaacaattatgtatgacccttgtaaggtggtgagtgaggatggttgttactggtcaagcagtacttaataaaggtttctggccatgattttttaagacatacctataccaaagaattgaaatctgaaatggtacagtcagacatatattagacttctctgtccttttatttccaaagtaactttagaaagggcataagctttaaggttcaaagttgcatcttaacagatcttaagagaactacaccagtggtttttgttttagatattttaaacatatatagatatagatctatagatacgcatgccattgttttcaaatacttgtttagcatttgaatcctttcttcaaatgagtttgtacaaaagccccatatataaatagacaaataggtaaggttatataagatggtaccatatgtcattcaaaactgtgtgtccattctggtaccccactcttgtctggaatccctgagatactgggaacagtttgaaatctttaaggttcgcagtgcccagaaggtgatacaaatgatttacctgcattaattgccctgttgctgtttggaatcaccttgtgatcatgcttaagaatgtgggcaccagagtcaaagctaccttgatcaaatcccatcttgaccacttcatggctgtgtgactttggacaacttatgttacatattgtgccttagtctaatcatatgtgtagtgtcctgccgcaaaggagtgtgtatgtgtgtgatgattaaatgaaaaataggatcatagtgtctgacatgtttttttaaaacaataattgtgcagaagtagtgtacacaacataaattaccactccccttcttgaacatctttttcttccttcagcacaccatttctccacctcaaggcctttgcacttgatagtttctttgcctaggacagctctttaactctttgaattgctggttacccccatccttaaagacttcacagatgttttaagataggacctcatttataccctgcttacagcaatctctaccccttcctccttcccttcttcccattttactcttttatttatctgaatcttttctcctctactccccccagctcttgtttcaaactgtaattacctggtttgtgtttattgtatttaagttccaaaagagcagaatttgcctgtctttccagtgctctatttccagtgcctaacagaaacctggtacactatggttgctcaaggagttttttgaaaacatgattattaccttgtaaaaatgaaaacaaatcaatgtcagatatagaataaccacctttagaggcacatttttctaatatcttgtcatgcaagacttcctgggattctcttaaagctgtgctgtcaaactgtcattatgctctctctatccatgggagacaaccctgagccctcacttggagtctatgtgtggttattttgatagatagaaactttagttaacctgtttctcaactcagagcaaattaggaccctggctttgcctggccttaagggggcactgtgttgaaatgtaatacttggtacagtgctccacctcgctgccttttgctgcacctctttaccctcctttactactaatatttgctgttcttttatcaccatcattgatcaaagcttctttcctcccttttcttattttctttctgttcctgattgattcttttctgtttgttggatttaatttgcaaaggttaaactaaaccagatttgtgttgtcttgttaaaattacatttgtgaactgaacatttttggaatgtgggacatgtttgtcgctcattgtggccacagcattatggctaacaatatattgttcttccacttaatttattcttaggcatttctaattattaatatttctttctgatacggtgtcacttttaatgaggactgaaaatgttaattaaacatacgaaaccctttgccacctcaaaatttgttttgaagatataaaagccttaggttaattttaaggctgagatataatttttaattttttataattatgggtacataatagatttatctatttatgggttatatgtgatgttttggtacaggcatacaatgtgtagaagtcaaatccaggtaattggcatagtcatcacctcacgcatttatcatttctttgttttagaaacatttcaattccaatcttttagttattttaaaatatgtgctaaattatttgttgtgctatcaaataccagatcttttttcttaaatactagatcttattcatcctaagtatatttttgtatccgttacccctccccacattttgcccccctctctaccacccttcccagcctctggtaatcatcattctgctctctatctccatgagttcaattgtgttaatttttagctctcacatatgagatataacatgtaaaattcgtccttccatgcctggcttattttacttaacataatgacctctccagttccatccatgttgttgtaaatgactgagtctcattcttttctttatggctaaatagtactttattgaatacaagtaccacattttctttattcattcatctgatgatagacacttaggttgcttccaaatcttggctattatgaataatgctgcaataaacatgagagtgcaggtgtctctttggtacactgattttctttctttggatatgtaccaagcagtgggattgctggattatatggtagttctatttgttttcttgaggaacctccatactgttcttcgtagtggctgtgctaatttacatttccaccaacagtataggactgttcccccttccccacatcttaaccagcatttgttactgcctgtcttttgaatacaaaccattttaactgaggtgagatgttatctgattatagttttgatttgcatttttctgatgactaatgatgttgaacatcttttcatatacctgttggccatttatagagatataattttttttaacctaagattaaaagtatattgtggtattttgcttcaggacataatcatgagatttctttgttgttgttttgagtgtaaattaggtgtttcaatataagatgaaataaatctgaaaccaaatgtatcaaatgattggatctctgacaagatctatggaaggaaaatgcaaaggcagctccttgtgacttcccctttttatttgtaaaagccctggtttacaaataggttgatattcctagtgtttgtttatgtaaggaaataatgcagtatttactggatacacctaccagctcataaagttctatttaagctgagttttcttttctttactttctttctttctttttgtttcttttaaagacgggatcttgctctgtaacccaggctggagaacagtggtgcgattatagctcactgcagcctcaaacttctgggctcaagtgatccgcctgccttagcctcctgagttgttggactacaggcatgtgccaccatgcctggctaattaaaaaacttttttttctttccccaagctgttctcgaactcctgggctcaagcaatcctcctgcctcaggctcccaagtagctgagtttacagacctaagccactacatcggccatatgctttaatgtttttgaataccgtattgtactaactgtgctagaacccaaaaaacataaccatttttttccataaattgaattccaaaatttaatatcttcttgctaccttaggagacggtctctttttccctaaatgccccttgcagaaaaagttcattagctctaaaaatcaggttaagagaagttggaggaggtgtgtttttgtttttgttgttaacttttatgaaaatttcaaataaaccaaaagtaaaagaccataatgaattaaactaccaccaaatatacttagcaattttttgtcacacttgcttcaaaacagattcttttattatagttaaaatagtaaaacttgcattgacagtattaaaagaaggaggatatatgtgagattggacatcgttttttactccttgatttctcttttatttttattttggtgactgctaatttttaaaacattatttctaagccagttcacctagctttattgggggaaaactataattgtgtgtgagagtatgtgtgagtgtgtgaaattttccataatagagtttgcatatatatgtattatgttactcatatgtgtcattatgtatgtaaatcatataaattttataagtacatatttataaatatatgtatagataataagctatatctacgtatatatacccttcattatggaaaatttcaaacatacagcaaagtagagctaatactgtaatgaacctccatgaatacatcactcagcttcaacagttttcagtttatgattcatctataacactctcctttcagctatttaaatatttaaaaaaatatgtaagtagggcatgccaaaattgaagactacctttgtacatacaggtgtttgagtttaatgaagaagggaatagaagacaaaaattaaagtaagtgttgatactagtatgctaaaaaggagtaattagctaagcaagcattaattgaacctcatgagtgaactgccaggaactatgagataactccaagatacaaaaattactaagaaaatgtagttcattgtgaggtgaacttcagtagaggtttcaacatgttttaagagcagaaattaaggtagactgggaggaggaggatgaaacattagagaagacttcttataaaatgattaggaacttcaggtctgagatgatcgtatgaagaagtgagaataaagtacttggctatggcacgtttctatgtagacagagccaagggctgaggaaaagaccatgctgaaacatctcaaaaagcaggtgtgataaatacattcagtttttagttatctaaaaatggaatggaaaagagtagttataggatcaatatggtcaatccaagtacctttttttaaaaagtgataaaaacagattttattcaggaactaatgcaatagggaagagacatctaagtatggaactgggctcaattccgaatacaacgaaaatggaagatttgtagtcaaggagcagggatagggtcagtgggtggaaaacacggatgtaaggaaaggagtagggggattctggctaaactagctttacagggattcttgctgaaggcagaccagggtgaccagataccctgggggatcctggggataaggaatttgatcatattgaggtgatcagaaatggagggtagggattctttctgaactgacttaacaggattcttgctgtaactgggcagtccaggcccaacaggaacagacactgaagcccaaggtcaaagcctagttgagaagagggtttagagaaacctaatgtttggtcaagaggagagtatttgtcaactaggaagaaaaaaattacataggtattgctatgtcttctgacatgaacaggcagctctaatcctgtgtagactgcactgtccagagataatcacactataggttttattaagtggattttaagggtagtcttaaggggggaaaagggagaaaaagtgttactggaaagcctcatgcatttttttttttttttggaagaggaggtgtaaaaaagagaagcaaataagccagttatgccttcaatactttggtgaagcactaagtatccaagtattttcagcatcactaagggctttattttattctaggaaaatgaattatagtgcctactacattcacaacccttgcacaattctcatgcccatcatcttctactcacagcacatgcaaagaagccaaaacagccatgttttatatcatatgaccctgctcttttggctacaggtattggattacaagcatgggatctcatggcagccaacacatagattgtctgttacctgtgatgtgtgactttgtacgaaatgatttgagccaatcatattcttactcatatttacatgaacagaggaaaagaaaatcaggcagctaaagctggaggaaacagagaagtccttgagatagatttggagccatgtattaggctcagatgccttatatttgctttggattgaattgctaatgttccaactgaggtatcctgggaatttgcatgaatgaaaataatcagactatgctttgtttagtaacaactcaatctgtaacataagttcatgatatgttataaatttaggttaggtgcttcctttttgagattatatatcatatatattaattatatataatattaaatatatattaaaatattaaatatatcaatattaaatatattaatacataattattttattaaacatattaatatatcatatattaatatattaaatatattaatatataagtattaaaatattaaatatatatattatatatctcaaaaaggaagcacctgatctaaatttatatataatataatatatagctaattatatatgagatatataatatataattaattatatatattatattatatatatatatgatgaggaatgcaagcagttcttatatgtaattactcaaccttgaaccagaattttctcttaggccccaaacaaacttctgtattatttaattgtagaatttaacagtaaggaaaactttttttaaaaaatttagtctttgacacttatctctatgagtcaaaatttttgcaattttgtgaaccaaaacaaaatacagaagtagattcatgacatggttggcatcattgcagctatgatctctaacctcaagtttaagatttttgtgttcattgaaacaatgtaattgttcttactattgactaagtgttgtaagtttgaacttacatttatatttttaaaaatattcttggcctggtgcgatggctcacgccagtaatcccaacactttgagaggctgaagtgagaggattgcttgagcccaagagttggagaccagtctgggcaacaaagcaagacctcatctctacaaagcataaaacattagctgagtgtgatggcacacacctgtaatcctagctacttgggaggctgtggtcagagaatcacttgagacttggaggctgaagctgcagctgtgatcgcaccactgcactgcagaagcatgggcaaccgaaacaaaattctcatatgtcctttgagtttgtgaagtaccagatgctgtgcttggtgttggagacacagtgatgtcttcttaggagtatttatctatttgaatagatattaaggaaacagatgtgaaattttatctatgtcaagatggaaaaatgacagaatctcttagaaatgtgttgaagtttgcaggatgagttaactgggatagggagggagacatcagtgatacaggcagaggggattagcagtcttaacaatcctgtaacaggaaggaatgaggtgagcttggaggactgaaagatggaaagaagagaggtaatacggtgtgagatgagactagagttatgtatgaggtagactgtgtggttttgaccattatgttaagaagtggaggtttttctgctttaattttaaagtgatgaagtctttgaataattcagagagttgcaatatgatcacatttacattttgaaaagaacttccttcttgtggcagagtgcacagattggggaactagaagtgggcagaatggatgtaaagagaccagttagaggctatttcagtagtctagttaaaagatgatagcttggattacagtgctagtagcagaataagaaaatagtatacagatttcagagatatttaggaagtgacaaccttgttatgatttttgtataggatgtgagagagaaggaactttcaaaaatgacacctagatttcttcaacttaggtggcggtaagagaatactgaaagcagatatagtgcatatgtttgttttgggagtggatggtaggtgtctgatcaggagtttagttgaatgtggagtctgagatgcatttgtgacattcaagaaaaacattccacatgggtagtcacataacactggtttggacatgagaagaaagatctagttagggagatgatattagtgaattgtgggcatactggtaataattgaagacttgggtgaatgacatcctttcggcagagattttagagtgaattaataagagtatcttaggtagaggaggctacctatacagaaaacagagaagattagagaggtgggggtaaaaaaatcaagagactgttgtagtcattaaagccaaaggaagaatgatttgataaagagggagaggccaagaattatataaaatggaaagtgaaaaaatacttgtcaggaaaactttatgaggttggactctcatggttcctggtttttaaaatgtgttattagcagtcccttgaagtcagttttttaaaatgaaaaattaggttgaaaatttaaaaccttggtattcttgctaaaatactaggcctcttccattaaaatatttccagaagtttcgggggggtgttactctttctggggtatactcaactttgtgtggtgaatctcttagtttaactgttgtttatgagcttatctgggtagagctatttttagtttttgcttctattgctaatccaggtgtttggatcttgttttcaatgttaatttcttgtcttgggaattctttgtaaatttagacccttgatgcttagcacagtgtttaatttagctttttttattggagccttttaagcctttagatagagaagaactttgtcacttccatggtggtggttagattgttttccatcttttactagacagcctttccataatcctcgctttgtaaatacaatcactactttgtttctggcatttgaagatatccctttttaaattctgatctggtaaatacttcttggaagaggaagggagcagggtagcatttctagcattagcttagctttccatgttgttggcacacaaagttattacttaaaattctgattttaaaattcccctcagaaatttggatatattactcctttgccttattagcaatccagtggttccactgagaaggtattaatctaattttgtcattcctttgtagaaaacctttctctctgaattaatgattttaagttgtacttcagtattttgaaatgtattgggatgtgtatgctctgcggaaaaaaaatttttgttttatatcagtgtaagaactagactacttaaatttttttatactttttatcttgttctaatttgctcttcatttttgtcctttatgctatttagcctatcttttattttatcttggcaattacaattttgccattcaaaatcttaaatggatcctttatcataagtctgtttcattaactatagactttaagtgcttcagagatgctgtattgtttgcttatagctacactagtactatcataggtactgttgttaatccctgttttacaaatgaagaaactagaatgcagagaacataagtaacttgcccaaccaaggtcacatagctggtcagtgtggaactaacattcaaacctatgcagtatgatgctagaacctgacctctcaacctctaggttatacttcctttcaggtctgaaagtttaatattaataactctttcagagttaatataactctgggttatattaaccatctgaatatattctcgcttctgtttctacagtattaatttttctatttgttgattttgatatttagctgtcatggtgattgcttttgtcaaatgcttgatttttttgggggggggatatgttgcttattttagtattggaaaagactgtaaaaatgctacaaagcttgcatctagtgattgttggagttgagatcataacttgctgctggaaaggatgtatcaaactgatctggggtataaggatttcctgttcatcttgtatccagcatcgttctgcttcttgactcacttgtctatgtgtagtgcttctacctcaggcagacacctctgatgcccacttccctgcttcgaaatagtagggggaaggggattgacctgactgagtatacctaatggcattaccctgaggattgctccaggcttttcccctgcccatgacagctgctttatactaaacatggaatatccctggaattgccctctatggtttgtggttttcttctgcctttcattttgggccctggtttcttcaatttcattttttctcatttgtctcagaaattataatttctttttctataaggccatattcttgttttatagtgctgctatggtttattctctttatatttttagtgctattatagtttaaagccaatgtttttagggttgcaggattttgggcaattctggtgagtgtaccgtttcttccattttgatgttatcttctgtcagcagttcttaatcttttgagatttatgaacttctttatagccctctaccacctggaccccaagcaatggctaaatgttattttgaacattactagttttgtaggtgtgggtttgaagttgggggcgtttttatttatatagaggtataagcatgttcttttgatatcttcagattatgttatataagtttgatgaaaacgctctgaaagatacatttatgtagccacagagtttaatataaagaaggagctatttctattaagcagttttataacatttctttttatctcttttctctaggtttaactatagatcaacacatcatcttgcatctcatgggttctatgaatttttaaattggtttgatgaaagagcatggtatccactaggaagaatagtaggtggtactgtaagtatattagcagttctttatgttaattataacatttattgttacttgagtaaatcattaattgccaaggtggtagggattcttgaaagctttgtatagttaacaaatttttctgtggcttattatccagtattcagtttacttaggctcttttcttgatacctcctccccttaatccccaacctgtttttgggttgtctcacactagccactctttttgacaagtggtggaggctgggtggggatctgctgtcacagtgtatctgaatgaagttcagtttatttgtgtatttgctcttatagcaatttggttgaaaaagcaatttggaaggagatagaaacgtagaataatcatgataattatatatctagaataatcagataattaggatttttcaggccctgaatatggagacattccaaattattccaggtaattgactaaagattatagttcatgcagacttctgatatccagaaagatgacacaaaggcaaatatttttaggatttgggacataaggagaaatgaaggtgaaagacaaagcaacattgtcttgtatcggnnnnnnnnnnnnnnnnnnnnnnnnnnnnnnnnnnnnnnnnnnnnnnnnnnnnnnnnnnnnnnnnnnnnnnnnnnnnnnnnnnnnnnnnnnnnnnnnnnnnnnnnnnnnnnnnnnnnnnnnnnnnnnnnnnnnnnnnnnnnnnnnnnnnnnnnnnnnnnnnnnnnnnnnnnnnnnnnnnnnnnnnnnnnnnnnnnnnnnnnnnnnnnnnnnnnnnnnnnnnnnnnnnnnnnnnnnnnnnnnnnnnnnnnnnnnnnnnnnnnnnnnnnnnnnnnnnnnnnnnnnnnnnnnnnnnnnnnnnnnnnnnnnnnnnnnnnnnnnnnnnnnnnnnnnnnnnnnnnnnnnnnnnnnnnnnnnnnnnnnnnnnnnnnnnnnnnnnnnnnnnnnnnnnnnnnnnnnnnnnnnnnnnnnnnnnnnnnnnnnnnnnnnnnnnnnnnnnnnnnnnnnnnnnnnnnnnnnnnnnnnnnnnnnnnnnnnnnnnnnnnnnnnnnnnnnnnnnnnnnnnnnnnnnnnnnnnnnnnnnnnnnnnnnnnnnnnnnnnnnnnnnnnnnnnnnnnnnnnnnnnnnnnnnnnnnnnnnnnnnnnnnnnnnnnnnnnnnnnnnnnnnnnnnnnnnnnnnnnnnnnnnnnnnnnnnnnnnnnnnnnnnnnnnnnnnnnnnnnnnnnnnnnnnnnnnnnnnnnnnnnnnnnnnnnnnnnnnnnnnnnnnnnnnnnnnnnnnnnnnnnnnnnnnnnnnnnnnnnnnnnnnnnnnnnnnnnnnnnnnnnnnnnnnnnnnnnnnnnnnnnnnnnnnnnnnnnnnnnnnnnnnnnnnnnnnnnnnnnnnnnnnnnnnnnnnnnnnnnnnnnnnnnnnnnnntttataactttatcttaaaattaatcctcagtggaagcctgttttctctaagagtcctgatgtcctgagatttgggatcatccctgtaataatctttcttatttgcctttgctggagaattttaggggtttcactggttttaggacagttttacttagtttgaggtttcttatacttaaggttattataaatgtagaacccacattgacacatttgaatgagtttcatattctcctttaggactttgtttctgctctgagcattggaaggcttgatggatgaatagaatttgtctagtttcataagcaggtcctgactttttgctggtaattaggtcttcactctgatccctgtgttgggtgaaaccccctcattttcattccttaaggcctgtatcaggcctggttatgtttggcttttttcttctctcctgtgggctcccatgacatcagcacctactttgaatttcctcttcatttttggcatctggagaataccctatcttgagcttgattatgctttttttgttgttggggttttatttgttgatttatttttggttctttcatttagtacttctatgaatcttggctgtttttgtgtgtgtcagttcagtctaccgtattatatggatatattgtcttatcttgaaaaatattttaaattcactttgtttttttttcccccccagtattgctgacaaaattacacactggtacctagtattgaatctgaagtagaacaaaatttttatgtgttgagaatgtggatgaattatcatgcttttttttcctccccctccccctttctccttccatgcatgcagtaggtattgagcatccactttgtgccagttatttttctggatgctggggaaaaatttcctgctattctggagcttatattcttgtgagcgtaggcagttaataaatagaaagtaaataaataaaataaatagtacgtcaaatgatgataagtattatggagaaaaagcaagagagttaaagacgggagtgtgggggagagaggttgcagttgcaaattgtatagccaggaaaggaaatgtataacctttgtagtttctgttatggagtaaaaaaagagtcttttaggacttacctaagggagcagatgtaaatgcatgttttagtcactgaataataactcaggaagaatgtcctgttcactgttcttgaatccttttaatatttgatgttcctcttttagagtgagggtacgtataactgttaactggcctcttctagtttattatttcccttttatccctaagtactttatgtggtataaaaaatttaatttttcaggagtcccaaaacattatctctggattcaccaactgactcttccctcttttcctagctagactgttccctcttttccttgcttactttccaaatctagggcttgaaaggagggaacatttttttataaatatgacttaaataattttgtgtgtaatttttctttatcttccttttctcattttcttatgtacacacaagtatgggcaaaattggagtatgttagaactccaaactcaaggataagctagactaagaccctgttttgataaaaaaaaaaaaaaaaaaaaaaaaaaggttagtgggatcagtaagaaagttacctacagttaacattgttaaacattttgaattttaatcattcttgtttcatattctccctgatctttttatgtattcctccagatatgagctagttctttgtatgcaacacaaaaaggtgtgggtttttttttgtagtttataaagaaggcaaattgttttgagatgttgctttcaaacttatgtaaggtaaacaaaatgtaatgataaagaagagtacatacattaatatttttgtgtctcattttatatgtaattaaattttccatttttttcttcctaggtttacccagggttgatgataaccgctggccttattcattggattttaaatacattgaacataactgttcacataagagacgtatgtgtgttccttgcaccaacttttagcggccttacatctatatctactttcctgcttacaagagaactttggaaccaaggagcaggacttttagctgcttgttttattgctattgtaccaggctacatatctcggtcagtagctggatcctttgataatgaaggcattgctatttttgcacttcagttcacatactatttatgggtaagtgacatttaatgttttgctgccattattactcgtgacctttctcctgaaacactttaggctgtacgcagatttgtcttttacaaattatgtagttgcgtacagagatctgtattactgttcataatcaatttaataatggataacattttaaaatatgttaggcatctctcaagttatgtgtaaatatcctttttaaataagtcagaactccaaaagaagagctatcataaaacaatctgttgatatttttgtttctttgttttggggagataggtaagaaatagttacccaggaaagttgaagcatggtttgatggctaagaattttaaattgtttctgaaactagcattatttattttgctgctgccaggctatttaaacttaatgattttttcccctgtgtatgaaatatgatgctacttgggttcactttagagcttgcatttatttatgtatttattattttagctttagcttgtaattttccagtgatagaaattaccaaaatttgtgtgtgtcaatatgtttttgtatattttattaagtatatttttaggtagctaggtgaatggcagcataaattttctctttaataattattttatattgttcaaaactacttggctaatgagtatttttgctctagcatggaattctggaggagaaggttgcaatgtgatcagtatagacagtgtcttaatcttgagtttaaaagagaagaaagaaaaatacccattcaagtgaagatgataccaagcagtaggatgttgccagtgctgctgtacttatcaaaaagtgtttttaaaaactctttgtttattgtgtgcagctgaggagaaaaaaaaaaaaacaccttaaaatcgagaacctctgttgaatgccttttaataaactatataatattttaaatcataaaaataatacatgcgtatgtggctagatcctgataatataatgcttagtggaaaaataagttgtgataaaatatgtgcagtatgagaaatccttgatgtaagtttttaagcagtacaaatcatactatgtctgttaatagcagtttataaagaaagtataaaaatgtgatagataagctgcatgtacgccagctttgtgataatgggttttcctgagggtgggtgggtgatactgaggtgggcaatattaagggagcttcacctagctcagctaaaaaaattttaaatcaaatattctgaagcaaatgtataatttttgaatttgaaagtctgaatagctaggttcataactattttaatattctctacacttgtgtatgtttcaaatactttataataaatttaaaaaataaaatattctattttgtggacatttatgcaacagaaaaatacaaagaaaaaaatcacccacagtgaactaccatttgcattttttaattttgagcacattacattcatgaataagtcccagttggtcatggtatataatctttttcatatgctgctgaatttggtttgctagtattttcctaaggatttatgcatctgtgttcataaggtgatattggtttataatattctttacttgcagtgtctgtctgtcttaggattagggtaatgctggcatcatagaatgagttagaaggtgttcccttctcttcagtttttggaaaagattgaggaggattagtgttggttcagttctttaaacgttttagtagaattcaccagtgaagccatcaggaccaggacttctcttttttgggagatttctgattgctgattcagtctccttgcaagttgtctctgcagattctctatttcatcatgacttagtcttggtaggtttttgtgtttctattaataggactttgttgatgtaagctattcaatttgttggcatacaagacttgataatactctcttaaaattcttcttgttccctatggaatcagtagtaatgtcccgctttctgattttagtgatttgagtcttctctcttttttacttaatctagccaaagatttgtcaatcgtgttgctctttttaaagaaccaacttttggtttcattgatttttttctgtgttctttttcttttctctcttttagtgtatatgctgctgaagcaagcactctattttatctctgttatagtctttattatttattcaattttgtctttctggaagctttgggtttagtttgttctttttctttccttctttttttttttttttggagacggagtcttgctctgttgcccaggctggagtgcagtggcgcagtcggctcgctgcaacctctgcctcccaggttcaagcgattctctgcctcagcctcccgagtagctgggactacaggcgcctgccactacgtgtggctaatttttgtatttttagtagagatggattttcacgatgttggtcaggctggtcttgaactcctgaactcgtgatccacccacctcggcctcccaaagtgctaggtttacaggcatgagccaccgcgcccagccctagtttgttctttttctagttcacaacgtagtttgtgaagtcaggtttttgacttgagatttttttttttgtttttgaatgtaggcatttatagctataaagttttcccttagtactactttgacggtgtctcataagttctgatacattgtggttttgttttcattcatctctgagtattttctcatttttattttttgatctgttggtaagtatcttgtttaacttccacaaatttatttcccagttttccttctgttattgatttctgacttcatcctgttgtagttggagaagatactttgtatggtatctgtctttttaaatctattgaaattaatatttggctttaatctgcggcccaacatattgtctgtcctggaaaatgtcccatgtgtacttgagaagaattgtgtatgctgtcgttattcaataatgtgttttgtgcatgtcttttagacctagttggtttgttgtgttaagttctatatcatctcctgtctggttgttctatccattattgagaatagagtattgatgtcaccagctattattgtagaactgtttatttcttcaattctgtcaagtgttttcttcctatattttgatggtctgttatcaggtacataaatgtttgcaattgctataccttcttgctgtattgaactgttttattgctgtatatattgggttctttctcttttgtaaccttttttttaaaaaaaaaattcaaagtctgttttttcttttttaattttgtagagatgaggtttcaccatgttgcccaggctggtcttgaactcctgggctcaagcaatcctccctcctcacttcccaaagtgttggagttacaggtttgaaccaccacaccctgcctttttttgtttcattttgttttgttttgaattttatagagttaaagtctgtcttttctcatattagtatagccatccctgctctcttttggttactatttgcatggaataactttctgtcctttcagtctctttgtctttggatttaaagtgcatctcttacataactgcatgtagttggatcatgtgtttattctttctgccaatctctgtttttggagagtttaatacacattggaagtaattactcgtaaagaggtactgatttctgtggttgtgctgttttctacatgccttatagctttttttttgtccctcatttctccattagtcttcttttgtgtttagtggattcttttggtagtgaaacatttgaatccctttacttttgagcatatttgtggattgccttttcactctggatagtgtcctttgcatgaattttaaatttttatgaagtctaattaatttttgttgttgttgttgcttgtgcttttagtgtcatatttaaggaaactgttggcctaattgaagctcatgaagacttacacctctgtttccttctaaagattttatatgtcaagttcctccacttaggtctttgatccatttcgagttaatttttgtatatggtgtgagagaggaattccaacttcattcttttgcatgtggatatccacttatcttagcactgttaaagaaaaatactcttttttgttgaatggttttagcacttttgtcaaaaatcaattgattataaatgtatgagtttatttctggactctcaattctgttccattcccttgccatctgtatgttgtgtctttatgccactaccgcacagttttggttactgtagctttgtaatgagttttgaaatccaaaagcataagtccttcaactttgttgttctttttcaagattgctttggctatatggggtgccttgcattttcataagttttaagattagcttgttcattacatctttttttttaagtggcatgatattgttttgttaattcaacagaaatttttgtagaatacaatatggagcaggtgctgttttatgtgttgattacacaaggttatatgaagttgataatctagtagaagaaattatagatatcattgctttgaaggatcatattaacagaaggatggaatggtaaaacattctcacccagaaactgggaggttatctagtgagtttttcctttgttttctttttaaaaacaatatatttaaataaattaggtttacggtggaaatagattcagtatttgaaaattagaacacttgtgtttgagttctggcataaaatactctctgactcttgacaaattgacacttttgaatctcattcagttttctcttaagatacagaaaacgttttgcctacagaattataatagatgatgacattcatttaaaatttcattattactaattgaaagtggaaataattacagttctaactactatgaaaagttgtttgtagcccaaatgaagttataaaaaggtgaaaacattttttgtaatctctaatatataaatgttaagttgtctaattcctcacccagtgtttttatttttaaaccaactcttttaaaaggtacatgtttttaaaatttaaaagataagtactttgtcatagcattattatttgttgatgccctattactgttacaagctggtgttgatagacatttttggatacacttttggatttgtgttctacagagattaaaacattttcatcgtgattgagtgattgagagtaaagtctatagcataattgccagggtttggttttctcttggtttgatttccagctctgtcactggaggttgtttaaatccccaccctgtgcctgttccatcaactataatatggaagtaataattgtaccttccttatataacttaaaaattaatacatgtaaaggtatagaatattgtgagaacatagtaagaaatgagtacatgtttgttattatttacgagcaccagagtatatgattcagaaaagtaattaacacagataaagtagtacaaggagcagtgtttatcatattgcctcttacaggttttgttttgttttgttttttgttttgttttgttttgtttctttaaggttccctcctgtacctttgtagtcagtcttctccctaccccatttctggcaaccactggtctgatttctgtttctctgtctatatagctttgggagtttcttttttagaatgccatataaatacagacagtaggcgtgaccctgtatatccgtcttccttcacttagcataatatttttgagaatgtcatccatgttgttgatgttttagtagtttgttactttttattgctgaatagtactccattatatggatgtactacaatttcttttccagtttttggcaatgatgaattaagtggctataaaatgtttgcttgtgggtctttgtttggacatatattattatttcacttaggtaaatgcataagcacagattggtggtttgtgtgataagtataggtttaactttataaaaagctgccaagcagtttgccaaagttgctgtattcattttgcattccctccacaaatacatgacagtaatatttactctacttttccatcagatggcatggtcacatttttaaattttacccattcttgtaggtaggtagtagtatcttatggctttcgtttgcttttccccaatgactggtgagcatcttttcacgtatttatttgccatcccagttctttgatgaaatgtctgttcatatcttgcccatgttttgattaagttgttttcttactcttgaggtgtgagagttctttgtatattttggaaataaatactttatcagatgtgtgctctacaaacattttctctagtctcttcctaagagcagaaaattttgatttttatggaatgtatcagcttttttttcaatagatcttgctcttggtatcttctctaagagatctttgcctaccctaaatcacaaagattgtctcatgtatttacttatagaaattaaatagttttaggtttaacagtcaggtctgtcatctattttaagttgattatggtctggtgcaatataagggttgttgggtttgaatgttaggtttttccaacatcatgtgttgaaaagattgttctttctccactgaattatctgctttggtaaccttgtcaaaatcaattgaatatatacatatgggtctgttttgggactcttctgtttatctgtgtctgtctatataacaataccttatgttgttttcattagtttctagaaactcttgaaatcaggtagcatgagtaatctaatgttatttctctttttcagaattaatttggcttttcttagctgtttgcatcatgtaaattttagaatcacattattaacttctttaacggaaaagccttctgggatgttgattggaagtgcattgaatgtataggtcagtttggaatagaattgttatcttaatatgtagtcttctgatctgtgaatatggtatttctttccatttatttagatcttcttcatttttgctttaatttttctgggcgatcaggttagtgacttgatctattttaagcaccgaaagctataatttttcctttacgtactttagctgtaccccataaatttttttattgaaaaataatttgcatattataaaatttatcctcttagggaatggaattcagtgacttttagtatattaaccaagttgtaccattaccactatccagttacagaacattttaacactccaaaaagaaagcctcgcccatgatcagtgactttccattttcacatccccccagcccttagcaaccggtattgctttctgcctctctgatttgcctattctggaattccatataaaaggaattatataatatgttgccttttgtatctttttttaaaattttcaaattagatgggttctccttatattgctcaggctggtcttaaactcctggcctcaagctaccctcccacctcagcctcccaaagtgtgagcgaccttacctgttttacatctggcttctttcacttacaatagtattttcaaggtttgtctatgttgaagtatttataaatactttatttttttattgctgaataatattccagtgtatggttatcacattgtatttctccattttttcagttgattaaacatttgggttctaatttctgtctatgatgaataacgcttctgtgaacatctgtgtgcatttttattacattttaaacatttataaacatctgtgtacaaattactataagaattgcacagagtttttatgctctattttaattttctagctcagatattttctaatttcccatgtgactgacagtgtcaccaaggatgctgaacttctatcctactccaaatctttttcatgactacttggtagggcttatgaaaagagcttgtgaatgtaaattcctcttatgtctggtttccttagctgttttaacacttgcttatttgccttgtgactttagctctctgataagcctaagaaaacttactattttgtagatcatctagaatttttcccttattgttgaggtgaaaataacattctcttgcagctttccacatcccaagcacaagtggaattcagtgcatctcctaatactgtgaaccaaaacacaagatggcccatgtttgtaggcctagagcaatactactttccaatagaactttcgactctgtttaataagatagtcactggccgcatgtatatggactttttttttgtgcaggtactaggtgcttcactataatataggtaatagaattgagttttacccttaaaatatttgtctcaaatatttatttcttttaaatcagttaggaaatgttaacttattctagaaacagaggacctcataatttgtgagaattatgtaaagttaattccctaagcctaatccattaaaaaaatccttttacaaaaatgtctctttagtcatctggatgcactacatttctgctagatttgctcagtatagaggaagaaagccatttgtaaattctgttggaatacagttttcatgccatgtttgggctaccactagatttttgccttttattccaatgtagatttttccagtgttgttttctagaaagtgttgcactttacattcatgtctgtgattcattttgagttattttcatgaaaagtataagatctgtgtctagattgatttttttttgtatgtggttgtccagctgttacagcattatttgttaaaaaaattattctttttctatgtattgccttttgtcaaaggtcagtttatatttatggggctctatttctgtgctctgttctgttctgctgatctgtttgttcttttcccacactgtcttgattactgtagttgtatgataagtcttgaagtcaggtgtagtatcagtcttgtttcaatatcatgttagctagtctcagtcttttgcctttccatataaacattcaaattgatttgttgatgtccacaaagtcacttgctgagataaggtttgttatcttaacaacattgtcttcctatcataaacatggaatatctctctgtttatttacatctttgatttctttcatcagagtttggtagttttccatatagggattccacacatattctgttggttttatacttaagtaattcattttgtgtgtgtgctaatacgtactgggtgctaaatggtattatgtttttaattttaaatttcagttcattactggtatataggaacaagtttaactttcatgtattaaccttgtatcctccagtgttgtctgtaatcatttattgattccagtaattttctttctgattctttggggtcttttacgtagacaatcatgtcatgcacgaaaaaaagtcagcttcatttcttccttttcagtctgtgtacttcttttcttttcttgtcttattgcatttgctaggacttccattacaatgcaaataggagtgatgagagagaacaactgtatcttgtcctgatctcagggggcatgattatgaatttatttctggattctgttctgttccattgatctagatgtctatgcctacctcataaacatagatctagttgtctgtactgacccaattactataacttcattgtacatttttaaattgggaagtattgtagatttttatgtattgatcatatattctgtgaccttgctaaatttgcatgttaaaatttactttttagattccttaggattttctacatacaagatcatgttatcttcagagacagagggtctttgctacttttttcccaaactgtatacctttaattttttttccttgcctggttgtactgactggaacctctaacatcacgttggacagggtactttttcctgccctatttcctgaaataattctcgtaggattggtattacttcttctttaactgtttgtttggcagtatttaccattgaagccatgtggaccagggaagatttttaatatgaattaagctttttaatgacatcgtattattcagattttcttttttcatgagtaatttggtaatatgtatctttttaaaagtttttttattttatctaaatgacctaatttgtcggcagaaattgttcataatatttctttataagtctttggatttctgtacaatctgtagtgatgtcaccttccttattcctggtactgataatttgtatcttctctcctttcttcattagtctagataaagcttatccaactttgggtttcactgatttttttttcctttatattttcaattgcattgatttcttcgtcttcattatttccttctaattcacacttggtttactcttttctagcttcttaaagttgaagcttaagttattttctccatttctacttttctagtataactatttatactagaatatactgtatttacttctttagctgtagtctctgtgttttaatatgtggtgttttcattgtcatgtggttgaatattcttcgaattcatagtttctttgactcatgggttttttctaagcatggtgtttaatttccaaatatttggggttttcttagcatacttttttttgttgatttctaattctgttgttgaagaccatactttgtataatttgtctttttaagtatatggagacttgttttatggtctagcacagaagtctgtgaagtatggcccatatgtaggttacctgctttagtaaataaaattttactggaacacagccctggccattcataaacatatactgtctttggcttcttttacaccagaattacagagttgcatagttgtgacagatctggctcctaagtgtaaatatttactatcttgactgttcaaaacaagattgctggatcctggtcaagcatgctctccatcctggacagtgatccacatatgcttgaaaagaacatgtattctgctgtttggaggttgcatattgtaaattaatggtcaggtcaagttggttgatattgtccaaatcttctatatgctcatcgtttttcttttcaagttctatcttcaacaatatggttggagatttcaataactgcctctcagaaactgtttcttcttttagttctgttagttcctgctttatatattttaaggatttgttttaggtccctgtatacttaaaatttttacattttcctggtatattgacccttttattatagtgaagtagttctctttatctctaggaatgttgtcttaaaatctgctttgtttgattgatttcatatgattcctgtttccatggcttatctttttctgtccttaaaatcaaactatttgtatctctggattttaaaagtttcattgactgcgtatggttagatcttgcttttttatccagactgaccatctctgcctttttattggagttttaagtattgtttgatttgcacctgccatttactgtcctcttttgtgttgaaatgcatttttaagtataccattttaattcccctgattgtttagcctgttattgctatttatttatagcgcttgatgcagagaacgaattatgcatcttaatattacaatctacttctacttaacataattctggtaaaatatagcagctttgctccaacacagccttattttttctctcctctcctctgtgctgttattgtcgtatgtattatatctatgtatgttatctacctaacaatacagattatatttatattcatataacttacacttattaaattaagaaaacaatcaagagagtcttctatatactccatatttaccatttccagtattctttattctgtcccatgatctgagtttccattttttataatttccttttagcctgaaggactttctttaatattttttctagagcaaatctgctgtaatgggatttttcaattttgccttcatttttcccccagtttttttaaactatggtaaaattgacataacacaaaatttatgttttaatcattaagtatatactttattggcattaagtacattgattatgcaaccaccatcaccaccatccatctccagagctctttattttgcaaaactgaaactatacccattaaacaatatctctcctttccaccttcccctccgcccctggcaccaccattcaaatttttgtctctatgattttgactaaatacttcacataggtggaatcatatagtagttgtctttttgtgactggcttctttcacttagcataatgtcttcaaggtttatccatgttgtagcatgtcaggattttcttcctttttaaggtggaataatattccgttgtatgtacatgccatatttggcttattgattcatctgcagctggacacttttatggtctagctactttgaaagtggttatacaaatctctctccaagaccttgctttcaattattgtgagtatataccttggaagtggaattgttgggtcatatgtcaattctattttnnnnnnnnnnnnnnnnnnnnccaaactgttttcccaacagcagtatcattttacattcccaccgacactgcacaaaggtttaatttttccctgtccttgtcaacacatgttattttctggttcttttgatagtagtcatcccaatgggtgtgaggtggcatcttggagttttatttgtagttccctaatgagtagtaatgttgagcatattttcatgtgcttattgcccatttgtaaaggcctacaccttctccagggtattcacggtgactttctaatttcccgtcatatatttctttgtatatgtggttgattttgaatgtcatagtctttagtatttggtttccaaagtggggaaaagcagaaaaatgaaggggaaaaaagtgccagccctttaaatcccctgtcagtcacttcagccagaggaggagggacttgcaacattggggccaaagtgcaaaggtgatcacttctgtctgctcttctatgacaaaaagcagcaatcagtgatcagagtgcagaacctcagtacttggaggacaagcttcctcacatcaaattgattctgcccgtgcaattattgtctaggtggggagctgatttctgttgcttcttctttcagtatcttcccagaatcctcacctgccttcctttttgaaggatagttatgtaagaatatattaggttggtgcaaaagtaattgcggttattcccattacttttaatgatactttgctctttcattgaacacttgataattttctctttcatttaacgctgtgagtatgtcattccactgccttctgtcaaaatttttttttctgatgcaaagtcaatcatatcgttacttccttgtgggtttttttttctttctcttttcaacttttcctctttgtctttatctgccagtactttgactacagtttgtctaggtgtagttctctgtatttattgtatttggtggcttcttgggtttcatggatctgtagattagtgcttaccttagaatttgggaagttgtaattgtttctttaaatgtttttatctgtctgtctttgtagcctctccttttttgaactttgtttttctctgttctttgggttggatacttcctgttgacctatcttcatgctcactgattcttctgccatctcaaatttgccattaagcctacttagtgaattttttattccatttattatgcttttcagctctaaaatttctagttcattcttatttctcacatgtataggagaatatgtatattctgtttctttatggaaattttgtgttatatcattatatttttctttaattttcttaatatagtattctttaattccttgaacatataacagctgttttagagtctttgtcctctaactccaacatctgggcccactcagaagtagtttttatcaaccatgtccccttccccagcctatacctgtccaaatttgggtcacactttcttgtttctttgcatgtcttatagttttgggttgaagcttacccttgttatttttaaaaatagcttatccgaacatgcaattttctatttcaaagcctctgctactggactccttaatatgtgtaaatgaagaccaaatggtgagcatgacttattgtctgggaaaaaactcaatccatattttttctctgctttcacaccaaaacaataatcatcaatacagaagacttatgtgacctcaaaatatttggcgatttctccccactgccaagcagttaattctgctgcggacaccagctggtgtcctccctatcatttctgacactgtctgtctggagatagcacgagatcccacaggttgagggcctgtccccaagacactgtcccagcttatgcccccagacaccagttgaaagtctgggcctctagaacttctgatagcccagcttaaattagggattcccatcaccccctcaaggtttttttttttttggatggagtctcgctctgtccacaggctggaatgcagtggtgtgacctcaggtcactgcaacctccacctcccgggttcaagtgattctcctgcctcagcctcctgagtagctgggattatagtcgtgcaccaccacgctcagctaatttttgtatttttagtagagacggggtttcatcatgttgtccaggatggtctcgacctcgtgatccacctgactcggcctcccaaagtgctggaattacaggcatgagccactgggcccagccccccttcacaggtttgattaatgtgctagatcggctaacagaactcaaggaaacacttagttcaatttgttggcttattatgaaagataccctaaattatacagataaacagccagatgaagagatacgtaggacaagatctggaagagtcccaagtgcaggagcttctgttgccatggagttggggtgcaccaccatcctggtacatggatgagttcttgatcaccttcctgtcagcctccttgtattcagctgtccagaagttcaccagaccctgtccttgggccttttatggagactttattggttgtccatgattgaagcatggacaaccttgtcaaaatgtgactggacaaaaagagtgtgacctaaacccagcaaagtctatctgttcagattcttcttggcctctctgtgcagcattccttcctccaggtatggggcagaaccctctctgaaatgagggtcttatgacccaaaatcaaattagagccctgccaagtggagaagtgaaaagtgagtaggagaagttcagagacagagattctgtaacaaggggagttaagagccacgaactgtggatgaaagtccatatatcataataccatacttacaaagtcctaacttttctcctaaagtcttttcagttccttctgagtagctcagctgttttctgttttggcaggtgttgttgttttccccttttcgttattgatccctctctccttgtttataattcttcagtgcctgctttgacattttgaccattcttttacatagattttgttactctcatttctgttttcatgcagttagtttctgatacctacctctattataacactttgtatatagtacctttcatcaatcctaaaatgtatactttctccccagattttgacatctctgaaattaggatgtatgttatgagtgatggtcatagtttctatgaaatatggtatattggttacttgcttttcagtttacttcctcctctagattgtgagctttttgtgggcttaaaaattttaaattccacacctatacttcttccatctgtgcctgctactgaatccactgtgggtgattgattggatgccttgcatctttcctgcctcattgccctcaaagttctgcccaaaaccaccacctcagtaaagcttctggtaattttatcccagccagaactgctttcctgcctttggcattcaggctctataaggaccttttggtactcagtgtttatactcaccgtagagtctcttttatattgtgtttgactcaagttcttgcctttgtatcttatctccacagtacaggactgagttatagtttgtgtccaacatagcctagcaaagttttctgtgtattagtaaatactgaaaaatatgtttcatttacttttctctttcagccaattggattgagtctggggaagttccaagatatgaactgtagttagtggttgtaaaatataccttggttttattgtaatagattatagcagtctgggttcagttaggagagagaaagaagtattaattatgataaaagagtaactaaaatagaaggaaactctatatggtatcctgaggctgagggagagtacccaggaaagggcaaacttggaaggttttcacacctcattgcgtagggtgtggttcagcccattgaactggtttggcactgctgaacaagcaaaagacctctctggagtgtagacacctaaggagaaggggtaggaggtggccatggtgacctgtggcatggtgtgtggatatcagtgagggcaagagactttgcagaaaatgagaaaaatgtaatttgttatttaaaagatgattctttttactgaaaactacataacagagaatgagagctattcttaaaatgtctcagtgtgctgctcagtgttataaatgcatatatgaagtatgtctgcatatctgaataaccacagtattttttagaataaccttgactttttgtagcctgtggttaccaaacatttaacttttaaaaattccgcaagaacatttgtaaacatttttattatatcagttgcttttgttttttaggtaaaatctgtaaaaactgggtcagttttttggacaatgtgctgctgcttatcctatttctatatggtaagatttcatatttgagactacatgaagtctagtaggtctctggaggttaaaacagttcttttctcctgaagtctgtaggatttttattttgtttaatgtaatctttcattactaccatcctctttccttctcctactcacaggtcctgtatacacctgctttggtggagagggctaacatttaacccctcaaatatttgcagcaagtaaaacaaaatgttttcaagtgtaccacttcaaaatacttaaatgttttattaagaattttttttaattttttaagattatattcattatttatttatttattttgagacggagttttgccctgttgcccaggctggagtgcagtggcacgatctcagctcactgcagcttctgcctcctgggttcaagcaattctcctgcctcagccttctgagtagctgggattacaggcacccgccaccacgcctggctaatttttgtatttttagtagagacggggtttcaccatgttggccaggctggtcttgtacacctgacctcatgatctgctggcctcggcctcccaaagtgctgggattacaggcatgagccaccatgcctggcctgtcatttcttttttcagagatagtgtctttctctgttagccaatctggagtgcagtggtgcaatcatagctcactataaccttgaattcctgggcttaagtgattctcccacttcagcttcctgagcagccaggactacaagcatgtgccaccacgcctggctaattttaaaaaatattttgtagagacagatcctcactctgttgcccagactggtcttaagctcctggcctcaagcaatcctcctacgttagcctcccaaagcactgggattataggcaagagctgccgtgcctgttttttaactttttaatgacttaaatttaaatattatttttctattcttcctagctttattcattttatttcattattattattattttttttttttttgagacagagtctggctctgttgcctaggctggagtgcagtggtacgatctcggctcacggcaacctcggcctcctgggttcaagctattctcgcgcctcagcctcccaagtggctgagattgcagatgtgtgccactatgcccggctaatttttgtatttttagtagagacagggttttaccatgttgatcagactggtctcaaactcctgacctcaagtgatctgcctgtctcagcctcccaaagtgctgggattacaggtgtgagccacggcacctggcccctagctttattttttaaatagctctgacaagtaaaatattttccaagttagattgcatactcaaaaagaacaggaaattttgcctgtcatatatcaagcatggaaccatgtttagatgaaataagtttttacttaacactcaattttaaatatggtattaaaaattagtttttcgtattggagttgactagataactgcttaatgttaaaatctgagtttttaaacagtcattatctaaacagtttagtgaagtgaacttagaacagagaaataagagtacttggaagttttggtgaaaaagataacccaagtaaagagttaactaaaaagagagacggattgagaaaaagctgtagaaagactgttcttctggcccatttgctttcatttcactccttaaagtaaatgaaggaaaactcttaaaatgaatttatgtgggtccgagaagaaataaatccctgtagttaaagatcatgcataagatcagcaagtacttttcagaacatcagattcactgtcagactggtttcagcttttctttgttcttaagtgaagagagtagataaggtagcatattgatattatgctcaattttcaaccttaatgtagtagatacctagagtcattaccgaaataatggtcatatcctctaggttaacctgtaaatttacttacttttttttttttttgagatggagtttcgctcttgttgcccaggctggagtgcaatggcatgatctcagctcactgcagtctctgcctcctgggttcaagcgattctcctgcctcagcctcccgagtagctgggattacaggcatgtgccaccatgcctggctgatttttgtatttttagtagagacaggatttctccatgtggtcagactggtctcgaactcctgatctcaggtgatccgcctgcctcggcctcccaaagtgctgggattacaggcgtgagccaatgtgcccggccacctacatatttttttaaacaggtttcttaagattggggttcagtattacctttttattcttctttctctttttttctacaccatagcctgtatagtagtcttgttttgaaaattaatgacaatttgagctaatcttttttttctttttaaacaaatgtcatggaatatgtgcatccaagttatctgagttaaagtggttagagcctggggcacattctgggtagttgtacttagcaatatcaaacttgttctctttcaaatttagacttaaatttttaaagtaatcagaagtctttcagataggactggcgctccattagaataacattgttttttgtgaaaaatagcatgtgaccaaggcagaaaactgatgtatgtattgaaaactgatggcagttctccacaaggggttctgaaatattttacgtaagagaagcattattggaatagatatgctagcatatagtctgctaacatgactgttgatacaaatgagcctttcaagctctgattattagaggacatctaagaactttgatattgacaggagcttattacctattatttagtgtaccaaaaaattaattaattctattggttgagaatggagattctctttagaatattcattaatgtagaccaagaacatcctcagttattctggctaaatagtgtatattgtataagccaaagattaaaatgggatcttgctttgtaatccatttttaagaaaaaaattcatgcccaactagcacttttagttttgagaatctcaaagcgtattcatgtcatctgaattttttttagttgtcagtgagtcctttcattgctcttactctcagtgacctttcttacaacaaatttgtcataaaaagtgggtgaggtaaaacccgtttttttattttcaaaatttatgatctatatcctaaaactccttgtctctatgacagtctgtttactgacaattcacaaattataatactctcagcttttctattaaatctaatttaatttgaacatttctccagtgcgtttggaaaagcatattggatttgtgggatcgtgttattttaatgatcaataaaaatgaggaatacgttcttcataggttagtaagttcttatttaagcatttctcaaaattgctaaaatcttaatgtttatatttgctcattgtatgtttagattcctaaatatacttattttaaaaagtaaaaatatatatttaacttagcacttcttttcctataggtctctgcttggggtggttatgtatttatcatcaatcttattccactgcatgtatttgtgttgttactgatgcagagatacagcaaaagagtctacataggtaagtaatttgatttttgacatctgtcaactaagagatgttttgtattcattcattttattgaagagatatttctatttggtcattattatgcatgaaaaggtaaaaataattttgtgttcattttgctgtttatattgataaggtcaggcatttttatataagtgctttgtcatcaacttttccttgacaagtttttttttcgtttttgtagaaattagtctgggtttaatatttgtctacactttttcctcctcttaattttggggaatgggaatttttatcatgaaaatcgttcacattttttatatcgaattcaacttactgtaagagattgacatcctcaaagtaagcagcttaataagctttcagaagctcttttttggataatgtactaatagactgagtctctgttgtctctagaaaaatgttcatttttctctacaggttttaaaacaatattnnnnnnnnnnnnnnnnnnnnnnnnnnnnnnnnnnnnnnnnnnnnnnnnnnnnnnnnnnnnnnnnnnnnnnnnnnnnnnnnnnnnnnnnnnnnnnnnnnnnnnnnnnnnnnnnnnnnnnnnnnnnnnnnnnnnnnnnnnnnnnnnnnatacaattctattataataatgtttttggaaaacaataacacaaagttaaatcttaattaaattcattttcaaaagcatagtagcttggcaatttctcagtaagttaaccatagattcgtcatatgaccaagcagttccactcctaggtatttacccaagagaaccgaaaacatatattcatacaaaagcttctatgtgaatgtttatagcagcatttattgtgcataatggccaaaaatgaagacaacccaaatgtctatcagctttatgaaaccataaaatatggtatattcatacaatggtgtattattaagccatgaaaaggaataaaatactgatatatgctacaacatgaaccttgaaaactttataccattatgtaaaaaagccagacataaaaggccacatagtatatgattctgttagtgtgaaatgtccagaataggcaaatccatagaaacagaaagtagagtttgtgggaaatgtccagaatgggtaaatccatagcaacagaaagtagattagtggttgcctggggatttaggaggaggagaatgtggagaggagaggagaggtgtgactgttgaatggatatggggtctctttcaaggatgaggaaatattttagaattatatagtagtgatggtcgcacaaccttgtgaatacaccaaaaaccattacatgataggttattaaaagataaattttatagtatattaattgtatctcaacaaaataaaaaagcatagtatattacatttatagccatttcagcatactttttcatttgatactgtgagggtaggtactattctcattttacaggtgaggaaacaagaggagacataataatttgctaaagatcatgtagctaataacggggctgaggcttgaactcagattttggctttaaagcctgtaatgagccagctgtagtagctcacacctcttatcccagctactcaggaggctgaggctggagttccacttgagtccaggagttcaagactgcagtgtgctgtgatcttgccactgcactccagcctgggtgacagaaggagacctgtctctgattgcatgaatgactgaatgaatggcccatgatgctaaaaaccaccaaatctgtgtgcctctcgtttaaacaaataaccgtactgttgaaatacatacacctatgtatttctctaccccaaaaacactataaacagtagttgggatccagaaaggagaataataaataacagattaaactttttttttttaagttaaatggttacagtgaaggaactaagagggtgttttgttgttgctgctgttgttgttgttttgtgtaaatttaaaaattggggatcttggaaatttaatggtcagaggaatacaagagagagaagattgagaaatacactttatgaaatgccatgattcaggaagaagagccaaaggagatgtcagaagtagtcaaataagtatattgttaaaatggtcagatggaagtatattctacataaaagtttaaaattcaagcagtgtccaactcccctttaaccttagcaccaagatttcaaaggattagaatttgagaaaggcctttgtatttggtagctgggattttttttttttttttttttttggtcactctagaaaaatatgaaattcatactactttggttgattcttgagagtattttaagaagaaagaataataaaatgggttagggatgtatgtgtgtataaagctaatgttcataatgttcaaattctccactctacccaacttgtttcttttacttataattatccaggagtattttgatgatttctagtctgctttcatagggtttacttctaaatgtatggaaagtagtatgatagagcaagtgttgctcttccttcatccagagtgtgtcaggatttaagttcaatttctcttaacttaatggtcctaaaaactatggaagcattgtaaagtgtttgtatataaagttctttgattttggcacgtaacatcctttgtcttttgttctctctccccttgagcagaaatgtttaggtaaaaaaaaataaggattgataaatgtcagactcataattatattaactaaaagtttagttgtgttgttctaagtgttgaattaaatgacttgaattattttaaataattatgaaaaagttgtgtcctctttgagtagattttttcatgtgtccttaaaatcaattgtagcacaaccacagaaaactgtcaaagtttattcacatgtggaaaaggaggcacatgggaggtaatgtggatgtatagtggtagaagagtggcatgggaattgagcaagggaggtgtaagaaaagctgagatgggaggccgtctctacttgaaattttgggaggaaaaatttaattttctgttaagagatatttttgacttggtgaatttcactatattgggaagtaaatgtttaaaaattatgttatgcataggattctactgttttaaaaggaacacccaaaccttatgttgcatttgtagaaagaatggcttgcaggaaatcacagtaaaactgatgggatgtgaagtgatttaagctttctaatttgattaaagcttatcatactttgtgttcatgtcataaggaaattattaaagatatgaagtcaaatttagggatatttactgtggtataacttgtaattgtgaaaatatggaactaacttaaatgaccaataggggaatgattttttaattgcagtgttgccatatggaatattatgcagcctttaaatttaatctttttgagtatttgatgacacaggaaaatgttaattaaaagcagacagtaaggattaccagtgattttttttcatacttatttctgctttccagatacatacaatgagtatgtgttaagtttataataaataagacttggtttttagtttatagaaataggaattgtacctcaagggctgcattaactagattaggttagtaatttaagcacagaaaagaaatcaatttctaatattgatgaatgcttttgaaatgtcactagaacagcttgtttatggcattgtctatgttttctgcagtgagttgagtaaggagagtaacagttgtttttcatattatatctaaaatgtattttttggatgatatttgctgggaaccgtcattaaagttttatgaacatactacctactttagttctgtacaaattattatgggcattatatattttgtgaataaagaaaagataatccaattattgagtacattaaaagtaaagccaaattattaggagtcacatttatacttggcagctgtaaacagaacacagctaatgctagtttaacttagaaaaaacaaacttaaaaagattgcatgtaaaaaatccagcattaaaaaaagaaaagttcccggatacaagggctggaagctctggagtttattttgtctaattctaccatactactgaggaaattaaagcaaatttcactcaccatacatttattaagtgttgaaaaaataaatactgttttgtgctagccattatgatacaaagatgaataaaaaccttcgtgtaaggagtgtatattatacagtgtaatcaatttaatagcatatgatcaaaatggaaatagggaaaaatttgtgaaaatcagtttggactttaaccatgttcttttaaaagttttggagataagtcttgatcttgagaagagagaatagtacagaagcagacttagaatttgtggtaatgtaaccataaataaaaggtgccatgacattgagggtaagagtacatactccagagccaatctaccagggttcaattcttgctcccttactactgtgtaactttggacaaattaatgtcctttgatgtccttaggccttaatgtcctcatgggtcaaataaagataataatagttaccttacagattgttaaggattaatgagttacaggttaatatatgaaaggtgcttaataatagatgaacacaaaaaaatactatttaagtgtttgcttttgttgttgatgttaaagttatgaaggaatagccagatagacaaaagagttcaagaggctaagagaggtgattactgtattaagactgaaaggataaaaccccagtgtgaatctaaggagtgttccttcttttttttttaagtgaaaataaactttcactcaactatttttggttgtgagaaacataatggagaaataacacttgtgtgttataaagtacaaaatagcaattaaaatataacctgtaataggtgtttttttttataattttaaaatttgataataaatgttgatatggtttggctgtgtccccacccaaatttcatcttgaattgtagctcccataattcccatgtgttgtgggaggaacccagtgggagataattgaatcatgggggtggtttatctcatactgttctcatggtggtaagtctcacaagatctgatggttttataaggggaaatccttttctcttggttttcatttccctcttgcctgctgccatgtaagatgtgcctttcaccttctgccaagattgtgaggcctcccagccacgtggaactgtgaatccattaaacctctttttctttataaattacccagtttcaggtatgtctttatcagcagcatgagaacagactaatacagtaaattggtactggtagagtggaaggctgctgaaaagatacccgaaaatgtggaagcacctttggaactgggtaacagacagatagatattggaacagttaaagggctcaggagaaggcaggaaaatgtgggaaagtttggaacttcctagagacttgttgagtggctttgaccaaaatgctcataatgatatggacaatgaaatctaggctgagatggtctcagatggagatgaggaactttttgggaaatggagtaaaggtgactcttggtatgttttaacaaagagatgggtggcattttgcccctgccctagagatttgtggaactttgaaatcgaggtagatgatttaggctatctggtggaagaaatttttaagcagcaaagcattcaaaaggtgacttgggtactgttaaaaagcattccatttttaaaagggaaacagagcataaaagtttgggaagtttgcagcctgacaatgcaatagaaaagcagaacccattctctgaggagaaattgaagcaggctgcagaaatatgtgtaagtaacaaagagccaactgttaatgccaagacagtgggggaaatgtctccagggcatgtcagagacctttgcagcagcccctcccatcataggtccagaggcctaaaggaaaacatggtttcatgggccaggcccaggaccctccctgctgagttttgcctagggacttggtgccctgtgtcccagctgctctagccatggctaaaaggggttaaggtacagttcagacaatggcttcagaggttgcaacctgtaagtctcggcagcttccacatggtgttgagcttgcaggtgcacagaagtcaagaattgaggtttgggagcctccacctagatttcaaagaacgtatggaaatgcctggatgtccaggcagaagtttgctggagaggtggggccctcaaagagaacctttgctagggcagtgtggaagggaaatgtgggcttgaagcccccatacaaagttcccactggggcactgccaagtggagctgtgagaagagagctaccgtcttccagacctcagaatggtagattcactgacagcttgcaccatgcgcctagaaaagctgcagacactcaatgctagcccatgaaagcaaccaggagggaggctgtaccctgtaaagccacaggggcagagctgcccaagaccatggaaacccacctcttgtatcagcgtgacctggatgtgagacatggagtcaagggagatcattttggagctttaagatttgactgccctgctggattttggacttgcatgggaccttcagcgcctttattttggcccatttctcccatttgggctgggtgtatttatcgagtgcctgtacccccattgtatctaggaagtaactaacttgcttttgattttacaggctcataggcagaagggatttgccttgtcttggatgagactttggactgtgggtttttgtgttaatgctgaaatgagttaagacttgggactattgggggactattgggaaggcatgattggttttgaaatgtgaggacatgagatttgggaggtgccagggcataatgtatggtttggctgtgtccccacccaaatctcatcttgaattgtagttctcataatttccacatgttgtgggagagacccggtgggaaatgatgcatgggagtggttttccccatactgttctcctggtggtgcataataactctcacaagatcnnnnnnnnnnnnnnnnnnnnccagtatttacagtggtattcagtatgtaattaaacaagtagttttgatggttttgatcctaaggtattgaaaacaataagaggctgtacagttttatgtttgtggcagataaagttttatcaagacaagattccatcttctacagatgcaatattattatttgcattaattgttttgcctttactgtttattgtaccttcaaggtaggtgagccaagagcagacaggcaaacgggactacaataactacactcctccgcccctattttttccataggttttcatttaaaattagaagtttcagtgttgattacataaagtgagttttcaagatgagtgttgtaacaggcactgaagctagttattgggggaaagagatgggattttccttagatcggtttacaatatttatggatcttctttgcagctttgccagtggatattttagaggttattggggttgggggaaactgaaagttcaaacacaaagggaagatggtattgcttgcaccacctatgctgctaatatgactcattgtgtagttcacaaggattagtcctccagtatctccttatattaaaactcgggatatttagagcaaggatctcacctgtgttgtagcaataatcattggcctgatcaaaaaggctttcagtgaatagaaacagtcttcatgttctacaggccaaccattatctagaagaatagacctgagtgagatttcctttaaaggtctattcttctcattgagaaatgtgtgtttcatagtccagaagaattaactcctgcatagaagtagttatggattcttcatggtatcagttaaatgaatttaggagcttactacagtagtagtcgacaataagaaaaggatgtgttggccaggtgcagtggctcacgcctgtaatcccagcactttgggaggctgagttgggtggatcacgaggtcaagagatcgagaccatcctggccaacatggtgaaaccccatctctactaaaaatacaaaaattagctgggcttggtggcatgcacctgtagtcccagctactctggaggccgaggcaggagagttgcttgaacctgggaggcggaggtcgcagtgagccgagatcatgccactgcactccagcctggcgacagaaaaagactctgtctcaagaaaagaaagaaaaggatgtgttaagaagaaccaaaacgtttttagtggcaacatgacttgtggtaacaggatttgtgatttcctgtagtttaaatctttttttattttttgtttgttttactctcttctttatgagtgaattaaatttgctggtatttgtcttttactacttcttgatatgttaggtatagtcactacttagctctagaagctactgaggatcattacctaacacctcttaagttacataaaaattatatattccatgagtttttcatagtctccaaacacaccacacatacagtacctttgtaatttcactatattttaatattatttcattaaacattgccagaattaaatgaattgttcccacagggtagaacttaaaccaagatgtactttgtttagatttgttttttcattttagttatcagtaccagatacacttgctgagtttgtttttttgtttttttgttttgttttgttttgttttgagacagaatctcactctgtcactcaggctggagtgcagtggtgccatctcggttcactgcaacctctgcctcctgggttcaagcaattctcctgcctcagcctcctgagtggctgggactacaggcatgtgccaccacacctggctaatttttgtatttttagtggagatggggtttcaccgtgttgggcaggctggtctttaactcccaaagttctgggattacaggcatgaaccaccacacccggccacacttgctgttttaaaaatgttgtgattaagtatctctactgaagtgttttgaacacgtaagtaatttcttgctgcttttacaagtctggagtttgtaaaatataagtttcagtgattcattctcaacatagtttataatgagcattgtccttggaaaagagaaatgatttttatcattatgtatgcctgttaagttaatcatatatttctctgctggtcaagaagaatcagtgttttgtgtttttttgttgttttattctttaatccatgtttcttactattctttatcctgcatatctaccagggttcacagtaaccagaagtgattacaaagaaataaaatatctttagtattcaaagccttcataagcctttaatcatatttgtttataataaagcaaaattggttggattttaaagtatctacccgttgtgtgtgttttggctaatactattttggttgagagagagcaaagcaattcaaaaatgctaatgtgatttaacatgggttaaagttaatgggaatatagtatttgcataaccttttctaactttatttacataaaaagaagtataacaataacttaaaagtgtaaagagcactgtcaatgtaagctgcaatgcaatgccttatcagagagaaggtacttaaagattgctttggggaacagcaaacttcttcaatacttaaaatttcatttgaatttgagtcagacttttcagtgccttttcttttctagaataattcacttgagcacattaagtcaaggactatggtatatttcttctctatatctgtctcgtcccacccttggatataaaatatttccaagaatgtagacatctttaggttctgttgagattattacttatctgtcccagatgagagattttctttggttaagaataaacagaataataatatatgtgtgtgtatatgtatatacatatctttctaatggtaattttttgtggaatttttctcacacattggaattatcatctccagtaatgaatgccagtaactgtgcatccacaggatggcagtgtggtaacattttcatgatgtaataaatgatttacaacactattggtatcatgtatttccttagagctcaccactttgatggaatgctttattcttctaacttaaagggtaagaaaagtaggtttacatggatggatagaaaattgtaatagatgggtatagtagtttagttagggttcttaaagagttcattggaaggagaattggtagagaatgatggctatgggtttgtcttgttgaggtcttctgaaaacactagagaacagtaccagacattaattacctcttcgaagtccatgtcaagaaaagaagagatcttaagttttatagagcctttcccccaccaaatgtcacatgacctttcttcctaatattatggttatttgtttacatctctgatttttagcaatttatctgactcttagagggtaggattgatcttaatgggattttctgtttttagaatatattgaccatactcaagttaatgtttaaatgcataaattgaagaggtaatttctaaacatatattagatgctgtagtacaaagtctggcaaaaagcgtatgttttcattttacagtggagattgtgtttctttatttattttgagatggagtttcgcttttgttgcccaggctggagtgcagtgcgatttcagctcactgcaacctctgcctccccagttcaaacgattctcctgcctcagcctcccaagtagctgggattacaggcacgcgccaccacacccagctaatttttgtaattttagtagagacggggtttctccatgttggtcaggctggtctcaaattcccaacctcaagtgatgcatccgcctcagcctcctaaagtgctaggattacaggtgtgagccatcatgcctggccaagattgtgtttatttttaagaattgagttacttcaccattttttttactcagatgtatctaatttcttattttctatgtcttaaaatgtagatttgtaaatgagatttaaattgagatatagcaatatatgtgtaattttacaaattcaagcagagcagtcagtattaagcaaggtatttgttgtatttgacatattatctggcaagcaatcttcaactttatttaatggaagtacaagttgagtactcctaatttgaaaattcaaaactttctgagcaccaatatgattctcaaaggaaatattcactggagcgtttcctgttttgcattaccagtttgggtatgctcagctattaagtataatgcaaatattccaaaaatccaaaaaacttctagtcccaagcattttagataagggatattcaaattgtgtctatccgtgcactgaagagtgttatgacataaaacacatacctccaatatgtaaacatctcaggttcagtgatccaaaaaatgtgaaaaataggtacttgggtccagttctcttaaaagtaaatgcttatgtttggattgttgtagataccacgtttatcagatttgtaccattggtgctggtaagtgggtatgaatgagactaattgggatagaggaagtttcaaggtaaaatactgttgaaaacttgtctgtttctattagtttatctttagcattaacctatgtttaccaaataatacaaattaaagtcccgcctgggctttttcatttcctattttctttttcttgaactctccatcactcttattattaacttaaactctagtgcatctgcttctgtataaaatgttttctactttactaatgatagtaaatatctctgagaagttgcagggaagtgctgaattgagagtattatcgggtctcctcttttcaaatacgcctggaaatgaatttgagcaaatgtctaagatgaaacttcatctgtagttaccaaacatgattgctaaaatttttacattgtcaagcaaagtgtggctccatttgaagagaaagtatgaatatgactatgaatatgtatttgtgtacccatatacctgctagtgattatttctggagaatgtgacttagagggaaataaatagggtggaaactttttcactttttactttaagacaaaaacaacatctattacctttgcaattgaaccaattatccatacagacagatgcagatttgtggttaccatgggctggaaataggacagaatgtggagtagtaagagcttagtgagtgtagggttttgttttggggtaatgaaaattctttaggactatagaggggtagtggttgcacaaccttatgcgtgtactcaatatccctgaatttgttctctttaaaatggttatgtcatgtgactttcacctcaatttttttaagaaggctttttcattcagtttgtatcatttcttatattaaacctaaattctgtggcagtgttacagcattcagtgtttatttgtacttagaagaaagaaatccagcttcagaagtgattgtcgtgtttcaacataagtggacttagctataataaaaacataaatgacataaggttttctcaggcctagtcagtttctagttgtgcctttgtgtgttcagtgtttgtctaggatttgacttctcagctctggatatctgaaaggcctgttgatcatagaatcttagtttataattgttgggagggatctacaaatcttgtccaacccacattctatagtgaggaaactgaagcttttgctgttaagtagttgtaagattacatagtgatcttgttctcagtttttaattttctttatactttagtatgcatggttctttttttttctctctctttcctgcctctgtgactctcctttatcagggcttcaacaggctgatttgtttaaaaaaataatttgtagacatttcgggtcatgtgacggggaaatttttgtttaactttgattacatttgggtttgggtacgtcatagagggtaattccattccaacattaatgtgtttggaaagaacgttatctgatggattatgtctgttgtcttctagacatctggtcctccattagcttgaggtcaatggaaactttacttactttggtccttcctattaaatttatgagcttcttactgtcttcctaacactgtggtcatctcttatcatatagattgtgaggcaacttaatatttgaaccagtagcccctaacttccttctctagatggatttcttttaaaagcaaatgaatattctttctcatctaagttgggtgaggaggaaagtgtgtagtacactatgctacacagtatataggatacacaaatacgtgtattcctaaatataccccccaatctttgtttttgatagagtagtttatttgccaaaaactattaaatgatgtgtaatctgtataaatggggtagtttttacgttaacttatttcagatgggctttatttctaatgaatttttagtttcagtgacttcaaatactttctctctaatcaattgcgtaacagtggtctgtgaatataaagcaggtatttgacacaaattgtaaatccctccccagtttccttgtccatttagattgacaaacttaatttagattgatgagaatactataacatacttagtgtgaaaagaagtgagtttcttttattagatgctaaattcagtagctggtctgtataatggcttgacttctgtgtacttagttctttaattacagaaaacttggtggacatatgaatttatttaactcatagtactatacaaaggtattatgggataataaaaaggtatgaactacttcagagcttttgagacagtagcaggtattcacacatgctggcagtggtgatgagtattaagtcatgtgtattttggattaatgccaataggactgatatttacttaattttatgtatgtattacttagcttcttgagtcgtatgaatgattgctaatggtagatcaaaacaaacttgattccatttctgggaaaggaatgcaacacaagtctcacaaactgttgtaatgatctgcaaaatatagtacttagtatttttgaaaaatggatagaatattcagaatctgtaacatatggttaacaaatggacatctaataaaagtcatttcaagattctgttcttaaattcagttaatactttgctaaaaacaggatttacatatacatttatgttttaggtacttaatggtagtagtaaattatccttgtttcctattttgtctttatagcatatagcactttctacattgtgggtttaatattatcaatgcagataccttttgtgggattccagccaatcagaacaagtgaacacatggcagctgcaggtatgaaaaatatatattttccttcttctaaagaatatgtggacgtgtgattggcagtcttccaagagatgacagtttttgatcattttggttgttgcaatgacaaccaaagtaatctgactcacaattatgggaaatctgtagataaaaattttatcagagattctcattgcaaggttcatgacccattggaagtctgtgggtagttattttatttgtaacatctgtacactgatactatatagatagcaatatataactttcagaggtggtgtttctatagagtttattatcagattctcagtggagtctgacttaatctccatcttcccagaatagttaagaatcactatcttactgttatatagcactttaaaatttatgaaatgcttttacttagatttctgaatggatgttgtcactttaccaagtagtaatttgagacgcagagagatgtatatttagtgttgtgtacacaataatgaatagaatgtctatgtaattacgcagtcacctgtctttacacgtatgcattacaacatttcctaaactctaaatctttgataatacttacttaaccattgtaaaatggacttttaaaaacaacccttaaaattgaatttatttttaaaaattaatattctagatgcttgaggattcttacatcctctttgtttaaagttttatgtttaatgtttttgtatcatgttttgtactttttgagaatccgtttttgcgactactcctttagttttgtatatcttagcactcacctttatatttactaatgtaggggagaaaagattgttatctctaacaaaagacagattaacaagagaaaagcataaattttacatgacacaagagtcttcagaagtgaaaattttaaaaaggcagggaaactgtatttttatgcttaggtttgatgaagagtggacagtcatgtagaaataagattggacaaagagaagtacgatctaatggcaacagactgggaagaacttaaggcctatttgttcatattcttcttggtgtctctgtgtcttcatcttttcctctgggtgttagaaggacccctctggaatgaggatcttataacctacttacaggaaggtcagagaattattttatgacctgcctcaggggagaacaaacagaaaagatgagagagacttcccagtttctgctggtttctcaaatgccaagatgccataatttggcatgagccctgatacaaatttagaatcttgtctaaatgtgtaattaaggtcacatcttattactcagttataaatagtaactatatatcaagattatcctgatcctaagtctttgtatccttcagcaaaacaaatcggagaattgtttttcagtgattttgaaaaattacttccctccaccccagaaaacccccctaaaatatagaggaaagggaggaacttaatgtgttaaataggcttgttattcaaatgggattttttttcccctttggtctggtacatgtgtaaggagtctgatcatttaggaaaaaaaaaaaaagtcacagaattttttggatgtattaattaggcaactgtcatttgacaaaggaaatgttggctagatgaaataagtagtctttgatatgaatggtgcaggacattctaagaagctctttcaaatgaaagtttttaaatgaccttggaaaactgctttgttgattatgtgacccttttctttaattaggtgtctttgcattgctgcaagcttatgctttcttgcagtatctgagagaccgattaacaaaacaagagttccagacccttttctttttgggtgtatcactagctgcaggtgctgtgttccttagtgtcatctatttgacttatacaggtacgtgttatcacctgtagggtgtgaatattgtctatacaaacaatataagaaaaatagccaaagtttctaaaatctgaataacagcatgactacaaagtgatttttttctttttttttttttttttgaatagtatatcttaattttgtggcatcaagctctgataaatctacttttaagcgtccttctcttgctggatgaatagtcccaaactataaaaagaaaaaaaaaatcagagcttctgttatttacctgttatatgctcaccttctcttgcatgcacacacactccctctttctcccctacttttcagcagtttactaacagaatcagtttcagtctgcttctggattctaagttaccctctaacctttatttaccagtccttagaaacaaattgaattctttctaaatttattctgtcaaattaatgtaaaagccgtgagtgtttaaaatcatctttgaatttatctggtgggatatggcatactggactagatcatttagaaactccctttcccctgccccccgtttattttattttttttaaatgatctggtcttgtttaatgccttagccttattagtcaactaaaagcttaagagaattggaaaactttctacaactttatctcaaatgtgtttctctggaagtgggttctccatggatattgtttttatttgatcactaccttattttttctgactgccaactgtctgaaataggttgacacctataaatgaaaactgaaattctttgaacattagtttgtctatctataattagcaataaacataaaggcaataaaagatttacaaaataataaaaaggcagattaatttcatccatgtttttccttccaaggttacattgcaccatggagtggcaggttttattcattgtgggatactgggtaagtacagttacattatttggcatcatatttattgaaatactgcttttcctttgtttttatctgttttgtcagtgtttcactcagttcttgggcaacacttctaagtaccaaagatgctagtttagtaaatgttaaattccttttactttatcttgttatgatacctgttctgaatgcatctttagtatgaaatgtacgttgtgtattactgttctgcatgggcaactccttgtttccgttttgtttgtaagaatatttaggttacctttgcgcaatttaaagattgatttgtcttttacctaacatataacattttcatctttagtaataattttttattcttaagaattcttaaggatactgtttaattgccatagataggaagaaaatttaattttttctaataccatctgatctaagtttttttgtttttttaaatctgtgaaacacaagagaatatatatctgttgtggtttttttttttaaagtgctgttataaaatgagttaatacatttggttttgaattagactagttcaataaaactttttttctctaaaatgttttcctggagattagaaaatatctattgattataatttatgcccctcctctgttcctgctgttctgtcttgttactccccaggtggctcaataaaaaacaatttattgaacagacatgctttctgatgtgataccagaaggacttgtgtccaggtctaattaaaggacataagcaaattatgcatgaatgactggaactaacaattagacacatacttcaagagttcagcctgtggatcactaacgaatttgaaggataacccaagttgtagaatgttattctgattaggttaaattactaggttaacttgtgcagttatattataaagtaataatataactgtaaaataaattatacagttatatataactgtaaagtaaaattgtaatattataatataacttgtgcagttatattataaagtagtcaattaattgactactttagaatctcagggtgtttcagtaataattttttcagtcctttccatttccttcacctgtctccatgccagcttcatgtcaagcaaggcattattgtgtaaggtgtaattattgggtaaagtatttctgctacaggttgagtattcaaaatctgaaacgctctaaaatcatgaacttgttgagcaccaacatgatgctaaaaggaaatgcttattgaagcatttcagaatttcagattagagatgctgaactggtaagtataatgcaaatattctaaaatctgaaacactgctggttctaagcatttcagataaaggatattcagtctgtagtaataattccaaaaggtaatgagactcgttgatgcaaacatgaaaaatgctgacttaaactacagaacaaattgccagttgaacagagatttctgtattggaattcagagccaacattctcatgtctggatctagataattctctgaattttacagagggcatattagttttagttttaccagtgtagaccaaacagaaactatccagtataactggttaccttggaaggtatatttaaataagaaggggtagggagtaggtaccatttctacaaccaaacaagatttcttcatctaaaaggaactcctgttttatcacttaattgtaaacaatattaacttttttaataccaggtatgcaaaaatacacattccaattattgcatcagtgtctgagcatcaacctacgacttgggtgtctttcttctttgatctacatattcttgtatgtaccttcccagcaggcctttggttctgcatcaaaaatatcaacgatgaaagagtatttggtaagagaggtttttaatgaatactttgatatggaatagttatttttctttttgagattatttactttaaatttttgtttttctatgtttgactctatatattcaagataaattttctcctttattttgcataggtgcttaaccaagaaaaattcactgagaggctgggcatggtggcacacgcctgtaatcccagcactttgggaggccgaggcgggcggatcacctgaggtcaggagttcgagaccagcctggccaacatggtgaaaccttgtctctactaaaaatacaaaaattagccgaacatggtggtgcatgcctgtaatcccagctactcaggaggctgaggcaggataattgcttgaacctgggaggcggaggttgcagtgagtcaagatcaagccactgcactccaccctgggaatcagagcgggactctgtctcaaaaaaaaaaaaaaaaagaaaaaaattcattgaatttgtattaagtattttgattgttttaatttaggactagtatattatggtttctgagaggttaatgttgtagtttgtgtttgagaattgaaaattttaactttgttgacaatagccttgactttgttttctgagtaaaattttatttaagtaggaagaagtttttagggacattcatcttccagatttcagagcaaagaccattttatagcggaataaggatcacctttcactaaacatcctcttcattgatagatttgtatatttccaactaataagacttgaaatacaaaatatttaaatgccaagtatttagggttctatatttctaatataagtggacaaaataagcagatatcaaaggcttctacatgatttaatcacacatgaaatatgctgtggttgttttgtatgagataaaaactgaaactgagaaaaactttatcacgtgcacaggatcacaccagttggtaagtaatttgtagtgctagaaacttgtacaattataggatctggaccatgagtgacacatgaatcaggaaagaaagaacagcacctgtaggggttcagtttaaaggattgcacactcattgttctctaggttaatggatcctggatgaggccctgttaatactgcatcattcaagaagatttaacttaaacctcatgactcagtaatcccattcctatgtatatatctaagagaagtgagtgcatatgtctaccagaagacatgtttaagaatgcattagtaattttatctacagtaacccctaatagtaaatattccaaagtcatcagcagtagcatgaataaatttttgtatatctgtagtggaatacaacacaacaatcattaaagaacaggatggggaaataagagaagccaatacaaaagagaacatttttatgtggttacattcctgtaaagttcaacaataaggaatactaattctttagaagtctaaatagtggttaccttttttgataggggagggggttgttactgactgagaagaggcatgaggacatataaaaatgttctatatcattatgggttgtagttacacaggtgtgtatatatacaaattcattgagatacacacttaagaatatgatgcgatgtattttttagtcaggaagaaaaatttaattagcatcagataaggtaggagctcacatgactcactgaatttgtaaagttatacatagccttcagccagaaatagttagagtcttttcctgtggttagcacattatccagaaagctctggctattggaaatttgtttcaaaaattttttttaagtttcttggcagtaactttgcaggttcctcctttgattaataacttacgttcttctcatcccgtttttgttttaaagcaggttttatgccagatattggcactggctttttatagattttaaatctataaatttattttgcctggagatgtcatgcacaaatatgtttttatctgccagctatgggttttttatgatgttattgacaaatagtgaattaagtctaattcttcataactaattaaatttgaatcatatacatttttctaaactgtggatgtgtaggttttatttagtgaacactagttataatttctaaatgtggctaattaatcagttgttcagtagtatcaatttagaaacaattagatcgtttgtgagacatttatataattccaggttggttttatagtgtggttttaagtatctagttcagtttcctgggaactttttccctccaacatattgtaagagaatttgtctttgcagttgctctatatgcaatcagtgctgtctactttgctggagtgatggtgcgactgatgttgactttgactccagtcgtgtgtatgctgtctgcaattgccttttcaaatgtttttgagcactatttgggggatgacatgaaaagggaaaatccacctgtggaggacagcagtgatgaggatgacaaaagaaaccaaggaaatttgtatgataaggtggggaatctaaagtaaggcctttaaattgtctatgtcctttcttaatttttccaccacagtaagaactatacatatcaagaaatgttattaaatgatgatttggacaaactgtgacttttctagttggtctccactgtttgcctcaaaatatgaatcctggtcagtcctttagctcagagttagaaaatagaatgtaatcagagaaggaattcctctttttggtaatttgttatctaaatacttaagatatatacccttgttaatatacccttccatttttgagagcaaaaactttatgctgtactaaattacataacatttggcactgtaaacccctctgaaaccatgtggacagacaggtgcttatccttgaggtccatactcagtgcatactttcaaaatattttggaagtgacatttgattggttgaacagtaaaatgaagggagcaaaatgccttttttaaaaccctccagttcgttagcaataggtaactggccaatacaggtaatttatttttaatctatagtttctcagttggtgcaagtgtgaaaaggacttgtaagaattagagcacttgtcttggatgacatattaaactttgctatttgaatattgcctggattttaaaatactaataaattaaacttcccagtatcagtaataactttgaaattctttccttctataagatgaatgtaattcataaagatgtgtgttaataaacccacattcctgatttttgtgtttgttgttattgttggggtttttttgttgctttgtggtttcttaaccagccttgaaatttagaagttgtgactttttctattctctcttcccttttctgttggggaaggtgattttttaaggtaatcgtagttttaacaagtctgttggttttagggtttcgaaatcagaagactgattctgttaatgcagttttttcctatactaaagtggtacatggtcaaaattatagctgagcattgccattttcaggatgtggaattcagattttataagaatttacatattaagatttcaccagaatggggtcatttggttaatctcctttgtatttaattaaagtataaggacaactgggtttgaaagcagcttcttactggagataattattttgctctgtgaccagtttctggattggtatattcccaggaaaccttattcacgtttgacttagaaaacactccatcacccacataagaatatctgatggttatacattttctgagtcatagaattaaattgatagataaacagtctctcaactttttccattgagtatcttaatgaagcaagtcaaataatgaatttgtctaaccaatttttttaatatctttaggcaggtaaagtgaggaaacatgcaactgaacaggaaaaaactgaagagggattaggccctaatataaaaagcattgtcaccatgttgatgctgatgctattgatgatgtttgctgtccactgtacctgggtcacaagcaatgcctactctagtccaagtgtagtcctggcctcatacaatcatgatgggtaagaaaataactcggatacaaaaacattttatacttacacttctttttcgttgtctcaaaggatataattaaaaaatagaatgttgtttgtgagattctgcatttgcttgtttttaattttttattttaattttggtaggtacacagtaaatacataattttatggggtacattctatttatgtcttttgatacaggcatgtgtaataatcacgtgtaaaatggggtttccatcccctcaactatttatcctttcagttacaaacgatcaagttacactcttagttatttttaaatgtataattaaattatttttgactgtaatcacactgtggtgttcgtacccgttaaccatccccgtgcactctcccccgcccctgccagcctctgccttgtgctcctgtgaagctctgtatttgaatctacctttctttgtcctctcctccaccttggtgccatgggtagtaatcattgtatttcatgctcttttccagaatatttctgcatgcataatcatatacattagtttttctcaaatgtgtggtctttgtacacacagcatcatcattaccatgaaacttgttagaaatgcaaattcttgacctcaccctaatgttacagaattagaaacctggggctggggcctagcagtctgtggtttaatagacctaggtgattcagatgcagctaaaatgtaagaacagctgatttatgtattgccatggctttcaactactctttcacttgggagcttattaggcttgtacactattaggccctaccccagaactactgaatcagaatcggctttttttttttttttttaaatacaagatatgcaggtggtttgtgcacacacacattagtttgaataacaccagtctagctcttcattgtttcacttttttttttctcattggtagaggcttttacttaataactaccatccttaaaatctgaaagtattcagtggtttaatacctcaagattttaagttagcctcttcacatttgtgacatctcatttaaaagagtattgtgattcttttcagcaccaggaatatcttagatgattttagagaagcttacttttggctaaggcaaaatacagatgaacatgcacgagtaatgtcttggtgggattatggctatcagatagctggaatggctaatagaactacgttggtggataataacacctggaataacagccacatagcactggtaaggatttactaaatacaaggttaaaaaatctttattcactccttagcaatcaggcttcacttgtgactaaataggaaaaatgtgggtgaaaagtactctgctgaattctcaaaatacttttttacacatatgttcaataaagtgagttcaaggtgtgcttattttgtttttaagaatgatactaagtatcattcagaattgcaggctgatttctggtagattttatgataaatttagcttactgaagaattagacaaaatctgaaacttaaaatgtttggcttgtatttttcgtgttataaactaaaaattatttgcaaatatgtaaagtaaatgcactgtattttatggataggcaaactgttcctctagctattaaacaactaatctgcatagattaatgtaatcccctctttgtacttcaaagatttttaaatacaaagagtagtcttaaccaaatgaattctatttgtattactgttgtagctaattatcagatgcatgctagactggggagaagaaatgtatgtgctagcaagatcactggccagccctggcctgcggttgtgagaagttgttttttctaagcttgcctgctttcatcataaaatgttaatgttatagaacttaattattagcaaaatattagagcatgtattctgatttttgactgtaaattagttatagtagttgagaggttcataaattccagtgcatttgttgaattcatagtaaatcatttctgcaaaaaaattccatgtaaaacaaactcttgatgaattccatgttgtagtaaaaaatatacattgatttttatgaatgtgggaataatcaaaaacattctcatttttttttaaattctgcaggtgggaaaagctatgtcttctaatgaaacagcagcctataaaatcatgaggactctagatgtagattatgttttggttatttttggaggggttattggctattctggtgatgatatcaacaaatttctctggatggttaggatagctgaaggagaacatcccaaagacattcgggtaagaaactagataattccaggtatgtgaaagatagctcactgtgtcctcgtaattctctcatcttgctaattgcattgtatttgtttcatcatcctatccctcagattagttccttaccctggctttactatttattaaagatagtagaggcatttcctatattaaaactttttgaagtcaaaatggaactaatataccattcttccctatgaagcagtcccttgccaagacttcttacttttacgtctcttcacagcctctcatgtcatccctttctttccatttccattgcttccactctagtacttacccttatgcttgtaaacctgaaataggatagtaaccttgaaattgctatctttgccttgtttcctccctcccagtgtaagataaaattgatcgtgttacttttaggctcaaaagacttcaatagattaagggaaagggtcttaaaaccatatagacatgagttaaaactaaaactgtcaacttgggcaagttattttagcaagtcaacataatatgctttgagcactaggtctagttctaggatctggaattaaaatggtgaccgaggccgactaggttatcttttgccaaaaataactaatttatagtgccgtttaatgagaatttatagtaaagtagttgaagccccagcctagggactggtacaaaatagataacctctgataaaacattagtataaagtgtaaactctttagcttggaatgtaagcctctttatgttttgccttcctttgctggtgtcttgttcttctgccacctttgtctactctgccagtatgttctagcccctgaaacttgcttgtgctttctttccttgactcacctgacacgtgtgtttttactgttctctttcctggaataccttccctaccacagacttgccccctctccaaaagcccttttctggtatactcacatctgtactcatcaccaaattatttatacctgttttgcaggagtccccagaccccaggcagcggaccagcactggtccgtggcctgttaggaaccaggccacatagcaggaggtaaggggcaggtgagcgatcattgccgcctgagctccgcctcctatcagaccagcggcagcattagattttcataggagcacaaaccctatcgtgaactgcgcatgcaggggatctaggttgcatgttccttatgagaatctaactaatgcctgttgatctgagggggaacagtttcatctagaaaccagcagccctccgccatccgtggaaaaattgtcttccacgaaactggtctctggtgccaaaaaggttgggaaccactgcttttttgtattagattgtgtcttacctctttcactaaattgtgagcttttagaagatggacatccagcattgtgcttttacatgatgaaggcacaaaagataagagtaattgccactgatccagaataaaggaatcttttgggaaaaatgtatgcaggtgtcgtgtgatgcagatgaagtaaagcctcagatttcctggtcaaatgtcaatgctgtaatgtttcccttaactgtgattagtaaacattatttttttgtattaatcttctgaaatttaattctcccagtatggtttttatttgtggatttgctttagcagtcagtgttaaaactgtgacatgtgatagatcactgtttctaaatgtatgctttgaacattaatattacagaagtcctaaatttctgtgcatcttaaattatttttaaactttgtgaatagataatacactcatatggttcaaaagtaaagtataagaggatatacaataaatgtctacccccttcacgtgattcaaaaataaagtataagaggatatacaaaaaagtctaccccccctaaaaaaaaaaaaagttcctctataggtaataacaatgtattgtgtacttgtaagttgctaagagagtagatatttcagtgttctcactacaacaaaataagtatgattgatgcatatgttaattagatcgatgtagccatttcacagtgcatatttcaaaacatggtgtacaccataaatatacacaaatttatgtgtcagttaaaaatgggggggcgggcgggcggtggagtccctggtaatcactggttattttcttgtgattcttaacttctagcaagttatataccctgttcacttcataatatgtcttggtgatttttccatgttagaatatggagaacttctttattcctttgtttacatttgcacagtacgttgcattttttgtgtgtgtgcatgatttatttaacctgtcaccattgatggaatttagattgtttccagtattttagttttataaacaatggcataataactttctgcattcattattttggccatatacaagtatctctgtagcgttaattcctggaaaaggaatttctgactcagaaattacattttttacctagagtgccaaaattgttcctcatagaggttaatttataagttaaccccataaaaattaccacaggagtctttttaacattgtcctccccaaataaagccgattttaaagttcatgtggaaaaatttagctagaacacttaagaaaactctgaaaaggagtaacggagatgaggatgggtaattgagagagccagccttacctggtattaagccatggtgttggtaccagtctctttaaattatgaaagtggctatgtgcagtggctcaagtctgtaatcctagcattttgggaggccaatcacttcagcccagtagttcaagaccagcctggacaacatggtgaaaccctgtctctacaaaaaaatgcaaaaattatttgggcgtggtgccgtgggcctgtagtcccagctacttgagaggctgaaatgggaggattgcttgagcccaggaggttgaggctgcagtgagccacagtcacgccactgcactccagcctcgaggacagaacgagacattgtctcaaaaataataattattaaggccttataacatggttcgaagtctggtgggattaatttttttgaggtgtaactgaatatggctttataaagatacctcagaagcttattcttacagggaaatgaaaagaggaaactgtagctttgaatatgttaacttgaactaacatagaacttgtggtttctttcttgtaggaaagtgactattttaccccacagggagaattccgtgtagacaaagcaggatcccctactttgttgaattgccttatgtataaaatgtcatactacagatttggagaaatgcaggttagttaaatccatttttctctaattttcattcaaaataatgtttaaaacaagtcttatttgcctctagaaaacaggataatgatattttgattgtgctgaagagaaatgtgcttatctaaatagtctttttttcattaaatttagatttctgaaactaatatgtgagaaattagaaaataaaattttagatcaaggacttctttctaacatatttattaacagtagcctcaaatccaatctttgcttgccatctcaccattagaactcatgcttttggaaagtattgttctccaagaagagttctcctagctaggaaacagtgtggtgtcttaggtcactttgctgcttggtggagaaaagcttaaaattaaagattcgaagtaaatagtcacttcagatgttcactctctccccattctccgttaccacaaatagctagagctgcctgggtcagagttttctagtatattagaatgatgtggtacaaaagcttaagggtctacaaaatgagtgaatgtgcaaagaggcattgtggcagaaagaagaaacaatggacttgatgtcataacacctgtgttttcgatcaggttctgtcaagtcatgtaactctcagacaatttgtatctgccttggattccacttggttcttttcttgtttgtaaataatggggcttggattgatgacttgatttttaaggaaaccagaatatgtcaccccaaaatatgcctctttgacatgaaagttaattttgagctgaaggcaatttagaagcagcaaacagagaaaaagttctatctaacctcttttctgcctaaaggcagaatataaattctcctttactggagacaactctaagactcttatcagcccagagaaagcaccagaggaatctgcaaacaaaatttactccattagtttctcccatatatgtacccttctactagtttctcccatatatgtacccttctactttcccatcttgaaggcctaagaccactatcctttgtcctttctccacaaatgtattgttctttgttaagcatgctataaaagccagagttctaagccactgctttgagttccttttcattgaggtttctcctgcataatgtgcgccgaacgtcttaataaatttgttttgctcttgttaatctgtcctttgttataagtgtctgtcccaaatttttatcttcatactattagtttcactgaaaactgcttatttctgtattgctctctggttaagttgataagaaagcagaggaaaaattgcttgcttaattttatactatcactggggatcaagataactatcaaaactaaaggggtgtgtttggacctcaatttgtgaatcaagttttaccgtgtttttttgtggtgtttttttgttttttttttgagagggagtctcgctctgtcgcccaggctggagtacagtggtgtgatctcggctcactgcaagcttcgcctcccaggttcatgccattctcctgcctcagcctcccgagtagctgagactgcaggcggctgccaccacacctggctaattgtttgtatttttagtggagatggggtttcactatattagccaggatggtctcgatctgacctcgtgatccccctgccttggcctcccaaagtgctgggattacaggcatgagccaccgcgcccagccccaagttttatccttttctaaaacaccatctttgtggctaatatggactagaatattcacttggtttcagaatagttagcatatactgtgttcctgtttgttgtgttgcttcaagtaattccaagtgaatcatattttatcattattcacttggaattactctgtagatgacttaaaaaacagcaggtgataatctagatttaggtttttgtttgtgtttataatttcttttgaaggccacacttggtctttaaacgcttgctaagaaagaagcacactggccataataatcagttaccccagaaaacatattttctgattggcttgtttctgattagtttctctgctcactactgatcacgttgaaggacctttttcttcctctcttttaagtttatcaatagttttaagccatgttcccagcatacattcattttgatgcctaccttactcaagaataatatatggttaaaatatgaagtgtaacttttgctatcatatagataagcaagaacaagtaattcactatttgaaggagagctggttttcatgtttgttttaaagttgagtttggccaggcctggtggctcacacctgtaatcccagaactttgggaggttaggtgggaggattgcttcagcccaggagttcgagactagcctggccaagatggcgaaacccagtctctgtttaaaaaaaaaaaatggaaaaaaaagttgaatttacttatgctagatttgtatgtcaacataaacttagtctgagcattttttttttccccgagacaggatctcactctgtggcccatactggagtacagtggtgcaatcatggttcactgcagtgttgacctcctgggctcagttgatcctcccacctcagcctcctgagtagctgggactacaggcacataccaccacgtccagttaatttttgtattttttgtagagacaagatcttgctatgttgcccaggctggtcttgaactcctgggctcaggccatcctcctgcctcagcctcccaaagtactgggattataggtgtgagccaccacatcaggacggtctgagaatttcttaaagtctccttctctccctatgttttccctttttatccctcataaatcctttcacggtttggtttttttatttggcctcctttgtagttcccactttcagaatgtagtatctcttacttgtgcatttatttaacaaataataattgggatataaagctacactttgaataagacaaagacatgtttacatcccaatcgaagatacaggtaatttttagcgttaagtaaagatgttaataatatatgttatggggtaaaagaacaagatgctatgaggaaacaataaaggagatttgtcagtcactaatctcaagaaaatatttccctgaagggggtggtaaaggagctagccatgcaaaagagctgaatgaagaacacgccaggcagagaggatagatagtgcaaggccctgaaacagaaaagaagccccttgggtgtgttctgtctgtatacctataaaaagggctttgatagatttcatttctatgttttggtgggttttttttttttttaatgcctttagaatgctcatttactctaaggattttgtgaaattcttactctgatgtacttagtttctctcttcctgattttttcctgtctagttagcaatacatgagaactattaaggtagatagattacttgattgttttcctagtttaaagggagaaggtattactgtaatgataacacttactgtcttataacactgaatgttttccaatatggttaacacccaataataatgtcacttttgcagctggattttcgtacacccccaggttttgaccgaacacgtaatgctgagattggaaataaggacattaaattcaaacatttggaagaagcctttacatcagaacactggcttgttaggatatataaagtaaaagcacctgataacagggagacattagatcacaaacctcgagtcaccaacattttcccaaaacagaagtatttgtcaaagaaggtgggtgccaagtgaaggcattaaagggtaacttaaggtgtgttggtttgtatgaaaaagaatttctggaaattgcaataaatttccatctgccagatttataaagactatggcttctatattaatacgaagtaaatatcagcctagcctgctaggagcattcctttcaaactgagcacttcagatatcccaagctgagatttttccagaggccttctggctttggtttgtgctattgccattagtaagacttacttgtaaagtaagatgtagctgtggccatcgctttccaaacctgtatgaaagtaaaaatgctaaattctcatcttttgagcagagcaaatttatattgcatcttcatgttccattcttagtatgatgttactctattattcattgaataaagaataggtttgggttgggtgagtccttctgaagcccaaaaaaatcatttatcttaagataattattttttaatgtaattgtgacaaagcttataggcaggaattatgagactactgcaattcttttctaatattatataagatatgaagtatttcattgggggtcattattgctcacttaagccaaatagattataatttttgctataaaagatggctaaaaattagtatttatataggttgtccagcagtaggaaatgggaagtaatgaacagtcagataaaatgttaaggttcattataaggtactatccttataatactgattattattagactgactttgaatctcattttttaaggatgcttaggtttacatagctcagatcagctatcttatatcattgaaacaactgtcttaactctttgttacttaaaatatacatcaaatatattcaaaatacagatgattttaatttgtactataaaagtgctgaatattaacggtgtgatatgtaaatggaagctttttatatgaatatgtgccagatgtaaattaccatgtctagactaatgtatttaaaaatgtcacatagagctgacattcattgtgttagtcatatgaaactcattatctttaggtaaaataacattaaaaaatcagatgattgtcacaggcatgaggtaggagaaactggtgagcagcaaatgctgctattctcaaagcagttactcctaagatatccaagtataactaaggtgtactttttctgcaaaaagagggctgttgaacttgttgtctgatgatatagaccccaaaggcagtgaattttcttcatttgaccccttttctcttcccatcattttccccaaataaatgtgaatggataaataaaacataatctgtcttgtgtgcccaaaacatatattgtggtggccaataacatattttgacattctggtttccatggctttagatgttttgtactaacactatgaaggaatgctttttatacttccctttctctatcctggttttgactttggaggaggagggtatacataacagcatccattctgagagtttaccagccatcgcaaagccggcatgactaaggcactagaaattgtagtccaggctgcagaaaaggctttttggcacatggttcactgccagtaggagaaaagcaccctgagggctattacacacttggatattcctggggcacatcataagatctcatagaaaaagtatcctgttagaatctggatgtaattataataaagaaactactagatctggtttgaatttttaaaaattgtaccctctgaagtttcttactttgtgccttaataacatcagtttaacaataaggtaatataatggggttaacaagttagcagtagctaatttttagtaccttaagaaggattgcattttgccttgtgttctcatccctgttagaaactactataaattatcttgaattgaacatcatggataaaggaacatgatgcaggatttacccagtttctgaaacctctgagagttgtatttaaatgtgaaaattgaattgagtggtcagtctcttgagtcttctgcctctgttaacccagagctttgatggtgcattaaattacttagtttcaaaaaatatttgctgtcttcaatatctagggctgtgtgtcagattgaaagacatatgtgcctataatttatcctgtggggttctaacataaatattttagcagtaatttgtaccactgcatttccggtaatttgtttctaatactaggaaacgtctattgaaagtattttagtgggatactgaattgttaagaaaaatattttatttttaaaagatgtatgaaactgaaggaatattgttttgctttacattttcaattgcttattttcctacctaaaggattatttttagagaatgtgccaagtgattatatctctcatttttgtagatggttacagtcatcctcattttacagaaaacagggactctaagagttactaagttaacgtgtttttctggcacacacctaatttcctggaggctaaatcaggagcagcattaccatttctgattccttagtctagtgttacatattctgtcttgcctggaaattttaataattacagctcagcactttgtggttgagaagagggctgaagattcattcacttgatggtgaggatgtctaggaacctagtcctttcactttgaatgtgttagtgtactcaggtaagaaacaccactaacagtttagtggtgttcactgaactattcaaggaatccagtcacaagaagagcagagagcttactaagtcatcatagtgcagtaaaccatgtgtgtgtttatagattttttaatcagtaagaaacctgcattaatactatgtgttttgtttttttatagactaccaaaaggaagcgtggctacattaaaaataagctggtttttaagaaaggcaagaaaatatctaagaagactgtttaaatgcactgttctggttcctaacttgaagcagttgtccttgtgagaaccggtctttgcctttagctcatgtcgtgtttcacagcaaagagggtacagaaccatcactggtccaggttaatgtacaaaattttctggcaatgcctgattaaaaaaataaaattggcttgttgagaacagctgttttcgatttctaatgtgaagcaagacagagcactgctgtaaatgtctagcagcagattttttttttattggtacatattatccttcaaatctgagaatttggactaactgcaccaaagaaccctctaatttggtccctggcacatgcatacttgtcaatgtttttattcttttacaagacctgcattttatttgaattacccgaatagcaatatgtaaaatacaagtgacaaaatgtgatgagagcttcttgaaccggtaaactagtacaggtctgagaaagacatattagaagaatcattatacttccttgaattatatttattttcatgtttctctaatgcaaagaatgtttcatcaaatgtatattttctgttgcttactgtttgctctgagaagaagctgctgtttcaaagatggacctctgagtagctaattgattcaagtagtttttttatgttgacacattattactgctgttagcagtcgttttcaccaggtacttacagagcagatttcatacatcattcattcaagggctaaatttatattttttggaaatcatggcaactacacaggatgttgcttaccaggacggagttttggtatcttagtactgaagttagcactatgtttacatgcaaaagattaaggaaaaaacccttaaagtggacaggtatccaaagttcattttctgtgactcatcaaagtgacaaaagacttgtaacaactttgcctggacttttttcattttacaacagttcatccattcacaatgattttgttctctgctccatattttttaatcccttaagcatttgatgaaacactctttagtgctatatgcattttcttacttttgttaaaaatgtgacaattgtcaaaaaatgcactaaaatgtaaatggagattgaacaagttcactttccagcttataggcaactttatacagacttgaacattttctccagttgtttagtaaaagtgaaagagaaagggtttttcctgccacaggatataacttttttttatataacaagcataacacaccactgcttttggtggaaaagtgcagaatagtatgtaccttttatgaagaaaaatgtaatttacaatattcagtgagaatgttactgctgattttcttttccaaggtgtagaatattctttgatttatagaattcatttttgacccagatgatggttcctttacagaacaataaaatggctgaacattttcacaaatagagtgtaacgaagtctggatttctgataccttgtcatttgggggattttattttactttgttgctttaaaattcaatgcagagaagttgttgactgtaggggaaataaagttaattcaaattttgtgttaagtgttgttttttacaaatcttttggttttgaaaggaattggtactgaacacatacctccttcttccttgttgactttcacaaaggttttaaagaaaatgtgtggaaaaaaatacgttagattatttcatcttagaccaagctattttatttggccttcttttaccctggaatgaaaatctcaggtttttttgtttttgtttttgtttttgttttttgttttttgttttgtttttggaagggatttggggagggggaacacctagccaactaggaattttatctctgtttaataaggatagggacctaacaaaaccatccatgaagttctggtaatgaaatgtcaagtctcagtatagaattttctcattagaaaaatcccaaaggaaagacccctcacctttctcaggaaacaacattttggttcagtgtatcttgtcagtaaaataccatattgtaactgtttgagcacttgtattgtagcacaaaagtgaaatagtagtttgaatacattggaatataggataattgacttaaaatattctttagatctcttaattcatttcatgtgtgatcactaacattgtacaccaaaggaacttaaagatcgtggccttgaagttttagactataaaacagcttttaggctgtagtgctctgtagtataaataaggcagtgaggcagcaactccaaagaaaattccctttcaagacttacattgtaacctacttgagtttatagttgtggagttttaattcatttgcattctaggccatgaccaagtgaccagaggactaaaatagtataaaagcatcctgtattgagtttccatagccaagggggtgtaagatcatgaaatttggagctgtttctcgtttttaaaaaatgagttgtaaaatacatattaaataaaatttaccaacttaaccattttgaagtatacagttcaatagtgaagtacatttacattgttgtgctaccagtctccagaactcttttcatcttgctgtagctgctgctgcttaatgctggttttgccatgttgcccatagtccttaatcgagataggtggagtaatgttgagctcaacagctgtctgccatggaaatagtaggaaattgagacagaccaaaaacagtaatgaaatgtcatgtcttatttttattgtgaaatgtaacacaagagaacacaaaaatgtacagttgacccttgaacaacatgagttgcacacatggattttttttcaataaatgtattgaaaaattttggccaggcatggtggctcacgcctgtaatcccagcactttgggaggccgaggtgggcagatcatttgaggtcaggagttcgagaccagcctggccaacatggtataaccccatctctactaaaattagaaaaattagctgggcgtggtggcaggctcctgtagtccagctactctggaagctgaggctggagaatagcttgaacctgggaggcggaggttgcagtgagccgagatcgtgccactgcactgcagcctgggcaacggcgtgagatgctgtctcaaaaaacctatataattaatgtattgaaacatttttggagatttacaacaatttgaaaaaagcttgcaaatgaaccgcatagcctagaaatattttaaaagttaagaaaaagctatgtgattaatgcacaaagtatatagataactacttttttgctgttgatttgagacagtcttgctccatcactcaggctggagtgcagtgacatgatcttggctcactgcaacctccacctcctgggttcaagcgattctcatgcctcagcctcccaggcagctgggactacaggtgcccaccaccatctctggctaatttttgtatatttagtagagatggggtttcaccacgttgtccatgctcatctcgaactcctggcttcaagtgatccacttgtcacgaactcccaaagtgctgggattacaggtgagccactgcacctggcctaggtactattcttttatcatttactaccataaaatatatacaagtctatcatatgttaaaatttatgaaaacttaagctcactacatggcgccattcacagttgagaaatgtaaaccaatgtaaagccatattaaatcataactgcataaaatactgttctataatatagccatctgttgctactatgagctcaagtgttgctagtatccacttaaaacaccatgtgtgacacttatcactgttttatagcctattactggttatgttttgggggactcaaaagttttatgtgaatttttgattggcagtcattgttcaggggtcaccttagtgaattaactgcaaagtgagcaattttgtatccgtgacacaggtcaagagaacagaacagtgccagtactccagaagcttcctcatgaccccttgtggtcactatcctgtcccacttccctctccaaaaggtaatcattatattggtctttattggtgctttgatttatggttttaccaattcagtatttctctctaaacatgttgagatgcatctatttgaactatagaaatggaataatagagtatgtatgatttttatctgtcttcttttgcccactatttgtgaaatgcatcgaggttgttgcttgcagctacacgttttttttgtttcattgctatatatagtattccttgtgtatgtctgtagctggctctcacacatatccattctgttgctaaagggtatttacattgtttccagtttgaggatattaccaacaatgttagaggaatactcttacatctcccttggtgcttatatgcatgtatttctaaaagtggaattgatggttacttccatatcccagtcaacccctgtcatctttttaattttgcctctctggtgggtgaataatgatttgtcatgatgtttagtttgatatttctaggttaataaggctggccatttagaaatctcccttttataaggtgttggttctaatacatttctcctggttttttaaaaatttattatgttaataggaattctttgtcttgtatataaggccttcatttgtgttgcaaattgcctaggaattaataattttaatatagtctatttccatctcttgtatacctatacaaaatcttttcctcacttgaagccatgatgatagtctgctgtgttttccagaaaatgtattgttctactttttatacttagctttgcagtccacctataattcatttgttgagcacaatgtgaattgtttttcttttaaggggttttattggcatatgtatatctaagtgacccagcaccatttattgaaaagacagttcatttcctacagctcttcagtatcccttttgtagtaaatcatatgtccatatatgcatctatttctagaccctctgttatattccacagagctctgtgtatgttgacttaatatatagctttaagataattcagaaaatatggtagagtaagtccatctgtccctccattgttccttaatttgccttgctttttcatacaaattgtagaatcaggttaagtttcaccaaaaaacaaaaaaaaaaccctgttgagcttttgatttggcagtgaatatatagatcatttggggaaaatgaacaccattgaaatattgagtcttgtgtccatgagtgtggcatatccttccatttatgcaggcgtttagtttctgttttattgcttttgaagaccttgcgcattttcataactttgattccaaggtatatgttatttttaatactatcataaaattagattttctatttctcagcatataaaaatacttgatttttatacgttgaaattactaaacttattctaacaattccaattttttttgttgtgaacatcataacttgggaataatgacaattttacttctccctttctaatcattatatatttatatttcttgctttgctgcactggctaggacacacacccagtatagtactgcaaagaaaaggcaacatcttgctttcttctctcacagcgaaagcttttgacatttcaccctttaagtttgctgtatattttctatagatatctctgatcagattaaggatgttactgtttgctgtgagttttttaatcatgaataggttttgtttctcaagtagttttttccttcattcattgagatgatgctgatttttctcctttaatgtggtacacgaattacagaaactttgttcacaatgttaaattaaatgaaacttgtattcctggaatagtgatttatgcttggtgaaatttactggtgaaaccatttgggcctggagttcttttgcaaatgcttttaattacagattatgtttcacagatacaggattatttcagttttttactccttgtttccattttggtgagttattttcaaggaattcatctaaattttcaattcggttaaagtaaaattgttgaaaatatcacttaattgttttaatgtctgcagcttctattggtgttcctttttaattatagatatttcatttttcccccttgaattcatacttctttccccccacctctgccatacacttttttcccctgattttccttggcaggttttgtttttttttttttctttacatcaattttgttagctgttttttttttttctttcaaagaccagctcctcactttagtgctttctacagtgttagttcattattttgtgccatttccttggggtgggcggagggtcatattcttttaaacttggtgtggtgattttttctttcctaatatattgttacagatttactccgagcataatttagcctccattctcacaggttttgaggtgactaaatgtcattaagttaaatgtatatttaatttccattgtacttcttttttaagaccatgagttatttacatgtactttctaaaaatttccaaatatggtggttttctaatatccttttattatcaacttctaccgttgttgaattgtagtcagatactctataattttaatcctttgcaattggttgaggcttgctctgtgactcaacttatggccagtttataaacatatagattattattatattttgccaatgaaacatagtgtcaaatgagcacacggtgctttcagagacataagtaaatgttttttgaatttttggtttttggttttttttttttttttgagatgacgttttgctcttgttgcccaggctggagtgcaatggtgtgatctcagctcactgcaacctctgccttctgggttcaagcaattctcctgcctcagcctcctgagtagctgggattacaggcgccctccaccatgcctggctaattttttgtatttttagtagagatggggtttcgccatgttggccaggctggtctcaaactcctgaccttcaggtgatccacccgcctcggcctcctaaagtgctagaattacaggtgtgagccactgtgcccagctgaatataaatattttacatatatataatttttctccttatgtccctgaaaacaatgtctgttcttttgacaattcttgggcatactgtttgaatcttttgtggctattttgttatttactgagaagaatgtactgaaatcacacacgattataatagattgtgtatttctccttgaattatgaatttatttctttatatgttttgattccatattaataagtttatacacatttggagcctgtatcttattggtaaattgagctttcagctttttagaaatgtcaatctttaataagattttttgttaaaagcctattttttttctgatgaataatagcattatgtcaacattgttatggtgttcacataatgtatgttttttattcttctaatacatcccactttggatttgttgagcttttaactttgtgacttgttggttttcatcaggtttttttgaagttctcattatctctttaaatgttccttcttcccctattcttagtactttccttctgagagtccagttaaacataattagaccttcttactcctaatttctctgtcctctcccttctctcttcttttgcctctccgttcactccttaagtcagccatgtctctttttatactttacacctgatccactgaaattcccaatcttatcactgtttaacatagcatagttttcaatgctgtgttaaatgctatgtattgtatctgataaatccattatctagagctcttgtgggtcttgtttctatggcatagtgggtctttttttctgctgcttgttgttcctgtggtcttcttacgggcatgggtttgtgttttagacattatatttaagaaattgtatgagtcagtttaggcctaaggtggtggtttacttcacaggaatttttatttatttatttatttattttgagtcagggtctgtcactcaggctggaatgcagtggtttgacactatagcctcaaactcctacatttcaatgatccttccatctcagcctcctgagtagcttggattacaggtatgagccaccatgttcagcccatgctttacagattttcttttgtttttgccgggtacctaggggaactaataaaccagaaacaccttaattcaatttatgaagggattaatattatataggaagctagcctgccatccccataagggctagttcattattttcaggctgaaattctctgaggatttcacccaagcagataggaatatttgtccccatagtcctacaaagtcattaaaagtggtattcaactctgtcaatttcccaagggaaaatggccccaaatgccaagcttgcctcagaacttgtcttcttgattctggcctgctaatactgttttggttctgttaagtcttgaagcggatattgttcagcttttctaattgttgttagctgggtagttggttaaaactccctattattagacatccctattattaaaattggaatttagcaataaaataatctgtgatcctttgaatcacagaacatatctaatatttaatgtttcttacatcttccccactatctgtatagtaactagacattgccagttctaagtgccacccagagacagtcacaatctcaattttacttagaaaaaactctccaataaaatgctatattttcaatttctaaatctttttgggggtttttttttttttttttttttttttggacagagtgtcgctgttgccaggctggagtgctgtggtgtgatctctgctcactccaacctccgcctcccaggttcaagcaattctcctgcctcagtggcccaagtagctggaactacatgtgcgtgccaccacgcccagctaatttttgtatttttagtagagacagggtttcaccatgttggccaggatggtctcgatctttttttttttttttgagacagagtctcgctctgtcgcccaggctggagtgcagtggtgcgatctcagctcactgcaacctccgcctcctgggttcaagcgattctcctgcctgagcctcccaagtagctgggattacagggcacgtgccaccagccaccacgcctggctaatttgttttgtatttttagtagagagggggtttcaccatgttggtcaggctggtctcgaactcctgacctggtgatccacccgcctcggcctgccaaagtgctgggattacagtcatgagctactgcggccagcctctatttctaaatcttaaaaatagccttagccaggcatggtggcatgtgcctgtaatcctagctactcaggaggctaagctggcaagattgcttgagcccaggactttaaggttgcagtgagctatgatcacgctactgcactccagcttggggacactgattaaaatatcaagtgtctcctatgaaactggcttcagtgaaaagtggagctagtaagacgaaaactaaagaaagatcaaatggcagccagagtgactaataacagtatgttctcataatctcagcatacttagttgttgaaacaagctagatagatagatgatatatcatgtgttcttccttccatagactaagatttacatggaccagagcccagtctgtatcctgctgaaggaaatttttaaaaatgctttgatggacttaactattaatgagaaaacttcactaacaaacattcaagaacgtggggactagtgtagctctgttacctccctttccccaagggaatataaaaagtaaaatagagacctgtcagtgggcaaacctagttcatatctcctttttctaatatcaagttatctcacatttagatctatactgtattttgagttgtttttgtatatgactttgaggtgttagggttttttaattcatttgatccaatgccatttgttgaaaagagtgtttgttttcctcatttaattggcacctttgtagaaatctgtttaaaatgttggtttatttctggattctctattctgttctattgatatgtacgtgtcttcttacaccaatagtgtaccatcttgattactgtaggtttaccataagtttgaagtctggtaatgcaagttctgtgcctttgttcaatggcccctttaattaccctgggaccacaggcatgtactggatatcttgggcaaatgaagatatattgtcacccaacctgtaactgacacaggactaatatccagaatatataaagaactcttaggaaaacaaaatatttttattagcccttaacagaagaaaaacccaaatggcaaataaatacatgaaaatgaacatactgtccaccagattggctaattggagaaggtatgcataaatgagctcccatatattgctggtaaaaaccactatggaaaactttggcattagttagtgcaactgacaatatacatattcctatatccagccattctaaatcttaaacataaatagacaagttgacagcagtatattcataaaaagaaatacaaggagaaaagatacctttatatggaaaaaacattggtaaaaacattaaagaatcagacaaaaggatatgtaacatacgtttctgtttatagttcccaaacaggcaagattattatattttgtttagggatgtatacataactgttaaagtataaagcaaagcaaagacatcattgcccacaaagttaaaataatggtcagctttgggaagggagggcgagggatatcagtgatttggtaagcagggaacttactaagttttacaaatgttctgttttttgagttgcattatgattacatgtgtctgttgtaaaataacttgttatgctgtacattttatttttgcactgtgcttggactatacagcagcaagaagaataggcagctacatgtcttcattccccatggaaagattacaagtagagactgactaaagaaaactttatgggaactctgaaaggcaaaggtctacaagaaccaagctaatgcccaatcaaggaaaagtcacattcaaaatggtaagaaattttgtggtagttttactcaggcttgccccaccctctccacagtgtggtagtgttgggaggaagcagcagcccaggtaccagtgacctccctcaagtaggagggagcaggacagatcttatttgcaacattttgggggctgctgaagaactggtctctgttttgcctaacttggagcttggatgaggaaaagtggtatacttagagcgcagccttggaaaagccatagaaagtggtgggtaactgaaagctgcaggactgcagacctatggactagaacaaggtacaggaagactctttggaaaagtaaaaaatttaaaagcgtggtgtaacagaataaaaacaaatacacacagggcctcaggcaagacccttaccaagcaaagtcctggagggtctttggggcttcatcgtgggatgatgctaaaggtcagaacacatcttactagtgagtggaggtccctcctggcatggagccagtctgcaaagactgggaaacttggctgtttttcagatg

SEQ ID NO: 1172 - DNA, 4242 bp, Homo sapiens
gcggccgctgctgaggcggagactccccgccgccgcttcctccacccccagtccgccggcctcgcggcgctgagggcgggagcgcgcagagctcttccctcctcctttttcttcctcctcctcctcctcctccgggtccccgcccagcacccctcgcaccaggcggcggcggcggaggaggagagctagacccgccgccggggcacaacatggcggagccctcggccccggagagcaagcacaagtcgtccctcaactcgtccccgtggagtggcctcatggccctgggaaacagccggcacggccaccacgggcccggggcccagtgcgcgcacaaggcggcgggcggcgcggcgccgccgaagccggccccggcggggctgtccggggggctgtcgcagccggctgggtggcagtcgcttctctccttcaccatcctcttcctggcctggcttgccggcttcagctcgcgcctcttcgccgtcatccgcttcgaaagcatcatccacgagttcgacccgtggtttaactatagatcaacacatcatcttgcatctcatgggttctatgaatttttaaattggtttgatgaaagagcatggtatccactaggaagaatagtaggtggtactgtttacccagggttgatgataaccgctggccttattcattggattttaaatacattgaacataactgttcacataagagacgtatgtgtgttccttgcaccaacttttagcggccttacatctatatctactttcctgcttacaagagaactttggaaccaaggagcaggacttttagctgcttgttttattgctattgtaccaggctacatatctcggtcagtagctggatcctttgataatgaaggcattgctatttttgcacttcagttcacatactatttatgggtaaaatctgtaaaaactgggtcagttttttggacaatgtgctgctgcttatcctatttctatatggtctctgcttggggtggttatgtatttatcatcaatcttattccactgcatgtatttgtgttgttactgatgcagagatacagcaaaagagtctacatagcatatagcactttctacattgtgggtttaatattatcaatgcagataccttttgtgggattccagccaatcagaacaagtgaacacatggcagctgcaggtgtctttgcattgctgcaagcttatgctttcttgcagtatctgagagaccgattaacaaaacaagagttccagacccttttctttttgggtgtatcactagctgcaggtgctgtgttccttagtgtcatctatttgacttatacaggttacattgcaccatggagtggcaggttttattcattgtgggatactgggtatgcaaaaatacacattccaattattgcatcagtgtctgagcatcaacctacgacttgggtgtctttcttctttgatctacatattcttgtatgtaccttcccagcaggcctttggttctgcatcaaaaatatcaacgatgaaagagtatttgttgctctatatgcaatcagtgctgtctactttgctggagtgatggtgcgactgatgttgactttgactccagtcgtgtgtatgctgtctgcaattgccttttcaaatgtttttgagcactatttgggggatgacatgaaaagggaaaatccacctgtggaggacagcagtgatgaggatgacaaaagaaaccaaggaaatttgtatgataaggcaggtaaagtgaggaaacatgcaactgaacaggaaaaaactgaagagggattaggccctaatataaaaagcattgtcaccatgttgatgctgatgctattgatgatgtttgctgtccactgtacctgggtcacaagcaatgcctactctagtccaagtgtagtcctggcctcatacaatcatgatggcaccaggaatatcttagatgattttagagaagcttacttttggctaaggcaaaatacagatgaacatgcacgagtaatgtcttggtgggattatggctatcagatagctggaatggctaatagaactacgttggtggataataacacctggaataacagccacatagcactggtgggaaaagctatgtcttctaatgaaacagcagcctataaaatcatgaggactctagatgtagattatgttttggttatttttggaggggttattggctattctggtgatgatatcaacaaatttctctggatggttaggatagctgaaggagaacatcccaaagacattcgggaaagtgactattttaccccacagggagaattccgtgtagacaaagcaggatcccctactttgttgaattgccttatgtataaaatgtcatactacagatttggagaaatgcagctggattttcgtacacccccaggttttgaccgaacacgtaatgctgagattggaaataaggacattaaattcaaacatttggaagaagcctttacatcagaacactggcttgttaggatatataaagtaaaagcacctgataacagggagacattagatcacaaacctcgagtcaccaacattttcccaaaacagaagtatttgtcaaagaagactaccaaaaggaagcgtggctacattaaaaataagctggtttttaagaaaggcaagaaaatatctaagaagactgtttaaatgcactgttctggttcctaacttgaagcagttgtccttgtgagaaccggtctttgcctttagctcatgtcgtgtttcacagcaaagagggtacagaaccatcactggtccaggttaatgtacaaaattttctggcaatgcctgattaaaaaaataaaattggcttgttgagaacagctgttttcgatttctaatgtgaagcaagacagagcactgctgtaaatgtctagcagcagattttttttttattggtacatattatccttcaaatctgagaatttggactaactgcaccaaagaaccctctaatttggtccctggcacatgcatacttgtcaatgtttttattcttttacaagacctgcattttatttgaattacccgaatagcaatatgtaaaatacaagtgacaaaatgtgatgagagcttcttgaaccggtaaactagtacaggtctgagaaagacatattagaagaatcattatacttccttgaattatatttattttcatgtttctctaatgcaaagaatgtttcatcaaatgtatattttctgttgcttactgtttgctctgagaagaagctgctgtttcaaagatggacctctgagtagctaattgattcaagtagtttttttatgttgacacattattactgctgttagcagtcgttttcaccaggtacttacagagcagatttcatacatcattcattcaagggctaaatttatattttttggaaatcatggcaactacacaggatgttgcttaccaggacggagttttggtatcttagtactgaagttagcactatgtttacatgcaaaagattaaggaaaaaacccttaaagtggacaggtatccaaagttcattttctgtgactcatcaaagtgacaaaagacttgtaacaactttgcctggacttttttcattttacaacagttcatccattcacaatgattttgttctctgctccatattttttaatcccttaagcatttgatgaaacactctttagtgctatatgcattttcttacttttgttaaaaatgtgacaattgtcaaaaaatgcactaaaatgtaaatggagattgaacaagttcactttccagcttataggcaactttatacagacttgaacattttctccagttgtttagtaaaagtgaaagagaaagggtttttcctgccacaggatataacttttttttatataacaagcataacacaccactgcttttggtggaaaagtgcagaatagtatgtaccttttatgaagaaaaatgtaatttacaatattcagtgagaatgttactgctgattttcttttccaaggtgtagaatattctttgatttatagaattcatttttgacccagatgatggttcctttacagaacaataaaatggctgaacattttcacaaatagagtgtaacgaagtctggatttctgataccttgtcatttgggggattttattttactttgttgctttaaaattcaatgcagagaagttgttgactgtaggggaaataaagttaattcaaattttg

SEQ ID NO: 1173 - protein, 824 aa, Homo sapiens
MAEPSAPESKHKSSLNSSPWSGLMALGNSRHGHHGPGAQCAHKAAGGAAPPKPAPAGLSGGLSQPAGWQSLLSFTILFLAWLAGFSSRLFAVIRFESIIHEFDPWFNYRSTHHLASHGFYEFLNWFDERAWYPLGRIVGGTVYPGLMITAGLIHWILNTLNITVHIRDVCVFLAPTFSGLTSISTFLLTRELWNQGAGLLAACFIAIVPGYISRSVAGSFDNEGIAIFALQFTYYLWVKSVKTGSVFWTMCCCLSYFYMVSAWGGYVFIINLIPLHVFVLLLMQRYSKRVYIAYSTFYIVGLILSMQIPFVGFQPIRTSEHMAAAGVFALLQAYAFLQYLRDRLTKQEFQTLFFLGVSLAAGAVFLSVIYLTYTGYIAPWSGRFYSLWDTGYAKIHIPIIASVSEHQPTTWVSFFFDLHILVCTFPAGLWFCIKNINDERVFVYAISAVYFAGVMVRLMLTLTPVVCMLSAIAFSNVFEHYLGDDMKRENPPVEDSSDEDDKRNQGNLYDKAGKVRKHATEQEKTEEGLGPNIKSIVTMLMLMLLMMFAVHCTWVTSNAYSSPSVVLASYNHDGTRNILDDFREAYFWLRQNTDEHARVMSWWDYGYQIAGMANRTTLVDNNTWNNSHIALVGKAMSSNETAAYKIMRTLDVDYVLVIFGGVIGYSGDDINKFLWMVRIAEGEHPKDIRESDYFTPQGEFRVDKAGSPTLLNCLMYKMSYYRFGEMQLDFRTPPGFDRTRNAEIGNKDIKFKHLEEAFTSEHWLVRIYKVKAPDNRETLDHKPRVTNIFPKQKYLSKKTTKRKRGYIKNKLVFKKGKKISKKTV

SEQ ID NO: 1174 - DNA, 40689 bp, Mus musculus
  misc_feature (1)...(40689): n = A,T,C or G
tttattaattatatattttgttagttgtgttgtcttgtaggaagtatattttaatgtaagttgacttttatgacgaggaagtttaaaagaaatagagaaaaagaaaaaaaaagtttgtgtcttctagtcagtactaccatctttgtttgataaaagcgcccttgtgaatagcaggcaccagctgtaggttggctgtctgggctgagacgggcattcatctggttttgactgtatcattaaaactgcacacctcttgaccttgagggtagataggccacttcctcccggattgcttagaggtccactgggtagcacttggaacaacacgcccactttaccttggtggtagcacggccctcagacccaccggaggtaacagtctgtgacattcagttctttcagcagcagcagcaggtggaattctgtccggccagtaactgcgctgtgatgtctgggagggcacggctcacagctgggcagccgctccctcggcgtgttgtgtgtggtgcctgagttgttcctgggcttgtttttctctgtgggtgtttgtgcacagggtgctgaggaaggctaagtggtttcccttcctctcagacttagtatgtttccgtgggtcagtgtgggctggctgaggagttcaggggacgtggactctgtctctctaagctatgtctgtccctcccccccaccccccaccccatctgattttgtgctgtggtattttcttgtctcagaatactttccactggttaacaagtcttagagcagttgctttcttttccatttgtttctttaaggagctttaactatttattgaaaagtgccatatatctcctttctctagctttctcctcaggcggtgggaacaccccttcttctaacccttaacaaaccaaccactaaggaatgtagctctttcgctgcaggagtgacccagtcaccagtcacatacagtgccaaactctaaaacccagctccctgagtggtgtcaggaccctgggtggcttttctcttgtgttgctggttgtcagaagcatcctggcctggctgagctctggtatgggacatcccagtgagccctgtgtccagccacggcagtgtccttgtcagacctcttgtcagaatggattgattgtcaagacagggttcctgttttgtggccaggaaagaggaggagcttgggtgctggtgtctctgagtaggggctgtagactccctcttgccttcaggtaacatacccagctgctcatagctggaaggtgggtgatattccagggtgtggcccggaagcttaacttccttcctccctcccttcttttccttctagtttccttcttgtgcccagttgagacctgaggcttctgcctcacactttcctgcaggttttgtatctattcccctctccctctttttggacgaccaaggaggaagtccctctgtgtggcaaaggatgagacatgggggggggggggggaagggctgcgggtgcttcctccttccttcactccaaacagagcccatgaccaccagccttggcagagaatgttccggttgatacctgtgacagcgaaaagtcacctgttgagggaaatgtctgtgagtcagagacagacaaagcaagtaaaggcaaggtcgctgagtctcgaacactcactgacaaggttgccgaggaaggctgtcagcagttgttagcatctgggctagcatgggctagcatgggctggcctggtatcacggacaccagatgcagggggaaatgtgggccttctgctcatacatccacagggaagggcggatccctttctcatcactgggctaccaggcctgctgggccttcctgaccaggcttgagcttctagcaaggtgcgtgatcctgtctgttctggtctctcttcatccctggcattgaccatgcccttgactctctgtcttgctactctaccctactctgccctagggcttaggctctgtgaaggatttttcttggtggccagcctacataggtatttaatggttgccatgtgctcttcggctcagagagcctgtcatgtggcatttcctatgctcggccactgaggcaaagaagtgactgtcccatctagagctggagggccggatggttctctcacacacagacttttacctttgtagtgtatgaagttcctggtgcatcctggtggctaggagaatgtcctcgttgtttttcctacttaactaatgcagtaaaagcttactgtgctgtgagttgaattcctgccgttgttcttaggacatggttcattagatgaatccctgaatctgaggagctctcaggtcgctcagcttggtctctggcatcagctgttgcatctttttgggcttttggagacacagctttggacgtgatcaagcctggtccacatctcaggcaggacttgtagaggacagctttcctaaaagtgtgggaaaccgccaggaagggatggtgtcccaggaatcctttcctctcagaacctggagacatggctttttcttcatccctggctgtctgtaaaggctaaattgagaagtgctcagcagctggcttgtccagcgcagtgatgaggttaaacctcagctaacatcatgttatataagtaggcccagtaactcagctgatgggtttcttagaatctagatgctaaacgctccatgcattcaagattaaatgcctagttcttcttcacacacagttctgggtagttgactcgtagccagcagccctcctgtggatgtaccccagacctttagaaagatgttgaggaaagtgctttttgcgataccaatttagttttataggaaaaagaaactgaaggtcaaaacactcccttggaaatcaactagttggttcaaccacgttaaagaagaaaggaagaaggaaagagagtttaagaggcgcgtgaactatcgtatcaataagtatgcccaagttcttttgtgggatccttgggatagtgctatttggacctatctgtgattaatgactgtgaaccactgttgggctgaccgtttgcagtgagatcaggaatgcctgcgtctgctggcactaaaccaagctgtagcattttcatgctggcatcttccaggtgtgaaggaagcaagactttgccctcctggtgctccgtggagctccttagtgcccagaccagcgccatttcccccatccacggcagctccgggccatgatttccccaagaattaaagttcctgttcctcatgccggtgaggggtagtgggctctgcgctgaccccttgctctccaggccggtgtctacactgcttaggctgagttagtgtgtgcagccctatgggtgcgtgtggtaatcgattcagacgggtgttctgaacacctgcagagaacagttactgcattcggttgtagactttgtgcttttgagtttacagttgggggaagtgtgacccattagttttttcaggcacgtgaaggtgggttattgtgaataaacgagcattgcctcaagtcctggggcacccaccctgcatgggcccattctggctcctggtcactttacaccagtgttgttagatagtgctgtaaataagagtaagttatataacagacgccacttgaaattttactttaagaagtctatagctccacacatatatttagttatatctcttgacagattgcctccacacagtatggagattgttttataccacagattatttttataaactagtgagtcgaagtgagaatgcgtctgtaatccaagccaatgagctttactgtcaggattatgtgcaccctggagccgagtgctgggagcttagcttagtgcatgcatagcttcctgaatacactggcagcctggagttggcttacgggttcccctttggcagtggtatctgtcctgcttcctgcctgtgagaggacagcagccaggccaggcaagggacctggagttggtttgatttctgctgaacaaagggttctgaggttgaaagtttgtcagctccttccgtagaaagtagtcccgcaagttaaagagcaggaggacagaagctgtgtgccccacgcctagagaatgattcgggctataggaaccattgaaatggggattggtggccgagttccactaaccagaactatctaggaccaaactgagtcatcctttggaaacggcggggcacatggatgtcatggtggaaataagtggagagttgctagcaaattttnnnnnnnnnnnnnnnnnnnnnnnnnnnnnnnnnnnnnnnnnnnnnnnnnnnnnnnnnnnnnnnnnnnnnnnnnnnnnnnnnnnnnnnnnnnnnnnnnnnnnnnnnnnnnnnnnnnnnnnnnnnnnnnnnnnnnnnnnnnnnnnnnnnnnnnnnnnnnnnnnnnnnnnnnnnnnnnnnnnnnnnnnnnnnnnnnnnnnnnnnnnnnnnnnnnnnnnnnnnnnnnnnnnnnnnnnnnnnnnnnnnnnnnnnnnnnnnnnnnnnnnnnnnnnnnnnnnnnctggctagaacgctgtcttacgtgctggtcctctttacgtgggatctggagtccagatccagctgcatccttggagcccccctaccccccccccaacacatccacacaacttctgttccccataaaagaacacttctctgctttgcagccgcctgtcttggaatgtaattctgttgtgcctttgttttctgtcactcgcccctcaaaagcaactgctgtaagcttgtttctaatttgtcttttctagccccaccccttcccccaggctccctttttccagccctaatttctggatgcacttgtgtcatccaggtactttaagaaccagttacctcagatgtgatgtggaacagtgtcaccatctggccctcttgatcctgccaactcttaccacacatgcaggaggccctcagagtgcagacactgacttgttttaagcaaaactcttcccaagtatggaaccaggggcttctggcaagcctgtcctggcactgtggtgggactggttgggagtgtcatctgaacggtgcttcctgtgtgttctgccattcagtattctcatagtctggagagacagcaccctaactggctggtctcgtatgcaaatcagctccaaagatgagctcttcctaacacatttccagtcgctagagctcagacatagaacattccttcaaacagcagggtagaagcccccatccactgccacagtgcattctgggaagatgtctgtagtatacattgctgtgggattaggccttgtgggatatggctgcttgtcattttgatgtattttaaataaataaataaatatatatatatatttttaaagagccttttttaccagttcaaaagcttaattaaccagctgtcaccacatctgaatttttgtctctggggcattgacggcaggcagagactaaaagtggcaactcagctatgagttgcctgccctgggctgtcctgctgtcctgctgaccgtgggacaccagggccagcgtgttcccggtgggtttcaactcagccctctgggtgtttggtctctgcctcacttagcggacttagtccttagtccttgtaagtgctttagccccagtggggttttcccagagcactgccacgagttgagtgtatgagtttagccaaataatttctccactgggaaaagcactatcacggaaattgtacctgcttcaaaagagaccagagtaggaaagactagttgcctaggccgtctgggagcaagcagttgtcacgtgcgggcaggagatctcatctgaaaagctaggtccaccagcaggggtgcagttgttaaaatgccagtggcttgctttcccatgtccccccacctaccccctgaattctgtaactgcaaaggaaactgagtggtactggagaaccgcagggagggtaccacagatgagagacaacgcttctagacttcagttcatgccacggatgcacacgatgccgtttcaactgtacgggagaatctgcttacgaacctgacgtcatccctgtgatggcgtcagaggccacagttttcacacgttaccatctctgcacatttgtcctcgaatctgagtcgcattattcagtactgtaaagttaacttgcgtcgagtttgatgtcgattcctgtgaagaagagcttttggcacgtgacagacagtgagttacaaaacacagcaaagcacggaattttttgcagggacaattttggaaccaacagaaaatgtcactttttagttagcatcttatgtatcacttttaccggctatttctaactttggaagggaaaccttgaagcttgtgtaacttagtggaaatgtgtgtgtcgcccttaggatgggtagccaagtctcactaagctgtgttaatctaacttgtatatatgaattgtaattaagagtttggattcacctgtttctcacggtttaaaagtgatgggtcattgcgaagtctggagatgtgactagtctatgatttcaagctgttagaagtcaggaagctctctgaaatgctaaaactaagattctagttttgggctcaaattcgattaagtactgtttgtatgccagagtatgtgaggtgtaaatgtagtggggtacttttcacccttgtagctgtaaaattcacattttgtagaacagaaaatagcttgtactactgaattaacaagttatactaaagtatcatgtcttaaaaacaaaaacaaaaatacatatatctatctatatatatacacacacacacagagttaagcttgttgctgttaccctgtctggatttgaaaattgtgctgatttatataacacacacacacatacacacacacacacacacacacaccccctataatggcctgaagcagacatacctgtaactacagttgcaaactgcagacattttggagagaacactgtaccatagctcattcattgcgtggctctttgctcctttttcctgtggtcattttagaaacgagtgtcaagtttgaaattagatctgctaagttggggttctgctgctgaattctgcactgggtccccaaacaaaccgatgtgaatgtagtttttccccctgtgtgaaggagcagccacagccccatcagaataggaggaaaagtctagaagtatctcaaggtttatctttttgtatatgaaaataaataataataaataaaataacctcgtctgtattttttttttaatttgtgattatttctgcatgtgtgtatctatgccatctatgtgtggatgcccagaaaggccaaaactgctcagagaggccaaaacttgtgatcagatcctctggagctggagttacaggtagtggagagccgacatgtgggtgctgggaattgaacttgggtcctctggaagagtagcaagtgtccttaaccactgagccatctctctagagccctggctgacctggaaactcactttgttgaccaggctagcctcgaactcagaaaaccgcctgcctctgcctcccgagtgcagggattaaaggtgtgcgccaccatgcccagtgcacagggtgtaccccatcgtgacagggaaggagctcgaagcagctggccacgtcgcttccactgtcaggaaacggaccaatgcctgctgccgtccggctcctgtttaaaaaaataatttactttttaagatctatctttcttcttgttttttttttgtttgttttttgaggcaaggtttctcttagtagccctagatgtcctggaactaggctgagcaggattcttgtgagtggatcggaaacaccctgggattcagttttgtttcacagatgacctcggcagcgcatggctaagtgtgggctcaaaaaaaccacttctcacttaaacaaattagtcacaggtcctgagagaccttgcagcaagcagcaggctgctttgccaagctgtcttctgtaccaggtgagagaaaccaggattatgttattcttttgaggacctgtgctttcgttatttctccggcacctcagcatcaagcacctgctagaaagctcttaagtggctctggataacagtccagttgcgcaaacatcagccctttttgtagaccaggctggccttgaactcagagatccatttgcttctgtcacccaagtgttggggctaaagaagtgggcaaccacaccagcaaatataagtccatgcaggtgttagggcccatgaattgccgaagaatgatatcctagactcacagtatgccaaagcaaagaacatttattgaacaaattccttcatgcaggggcccaattccattgagatggaaggaccccgactgaattcaaagatgcagttttaaagccaaaaagaggaacattagggaaggttgggtgatctatatcacgattggtgggttctatctctgggggtctgggtgatgccatgattagttagggtctccattcaagcaaacttcatgccaaggagggggcagctcttgatctcctagctgtaagtttgcctaacgattcttttgcaagctagggaggggtcccttttatgtaagcctggttgtcccagtaactgacttgcccagtctgggaagtagaaactcagggctagtctcctgaactgctggtttgcagcctgtcatggagtcagcctggctcaggccaatgctctttttatgggaagctggagactgctgccaggtgaagacccattgatctgagtgggagtctattaaacacgaatattcttctttttacaaaaaataatttacggtcttcagagtgagttcctggacagccagggctacacagagaaaccctgtcttaaaaaaaaaaacaaaaataataacaatttacttaattttattttatgtgcattggtgtgagggtgtcagtcatgagctaccatgtgggtgctgggaattgaacccagaccctttagaagagctgacagtgttcttaatcacttagccatttctctggaccttatgttctccctttgtcagtgggcatttgcccatcaattttgtctaagaccaatttgagaggtcccataaagtggctaacatttacagtgttacttgacggcatgcatcccgtgtataccaccttagtcctgagatgaatccctatcgtctaagatgatgattttaacttcttttttgagacagggtcttgcgatgtagctgagactcatttggaactcactatgtagtctaagctgatctggagctcagaaattccttccttgtctttgctagcgctggggttacagatcggctccaccaagcccaattacagtttattacatcgacttatttatgtctggctgtacatacctgtgcatgtaggatggcaagcccatgcctgtgacggtgagaggacagctttcaggagtcagtcctcttctaccaagtaggttccagggactgaattcaagtgtcagttttggtggcaagcacccttactgatgaaccatcttgcttgtctaggcacaaattaaaagagataacatggactgacacactggactagtttggtaaggatttaacttctgagctctggcccatccagagtctctggctaccattgagtactgttttcccaggaaactcgataggtggtacaaacactctgatgtgtattttgactttgaagcaagtgccccaaacagtccaatggggtacaggttttggaatcacatcgagttggatcccaggttaggagatctttgatggatcatgaacaagcatttactcactattaaatgggactaaagacaatttcttcagaggacagtacacacacaccattaaattgacaagctaggacacttaacccatccattaactggccaggaccagggatggaggtaggcgtgcctcccctgctggactctaggggacgcgcgagaccctcagcagcgaaggcctctgggaggcggttcgggatggcgcatgcgcgcctggttccggagccggcgattggaccattccggcctcggagcccccgcgtgcgcatgcgtggcagagacaaagtgctggcgcccgcgagtcatggctgcaaagagcttcgcttcccgtctcagggactcgcggcgatttctgaatggcttcttggccggggctgtagtgggcgccgcgggagcggggctaacggcgctgcagtttttccggcgtccggacgcggaatccgcgaagctggcgaggcagccacacggtgagtctgcaagcctaagccggctcggttccccactgctcccccaaattcttcacctggctgcgggctcacacgtcaccacccctccatccttagctccaccccgagctgagactctgtttgttctccaccttaggtgcagcacagtgcctggtacagaattggccttcagtaagtgtcttagtttcttttcctgttgctgtgacaacgtatacctgacagaagcaacttaagggaagggtctgttttagctccccgttcgaggtgcaccccatcgtggcggggaaggagctcgaagcagctggccacgtcaggaaacggacgaatgcgtgctgccttttggctcccttttctcccagtttatacaatgtggccacgtccctccactgtcaggaaacggacgaacgtgctgccttttggctcccttttctcccagtttatacagtgcgaatcccagtcagggaatggcccagcccataattaatctggggatccccatatcatttaatacagccaagattccccctctccccataggaatacccggaggcctgcttctcaggtgtttctagattctgtcaaattgacaacatcacaacaagaatgtttgaaggcgtttccgtaaagaatatctgctacccagtcttcctagtatgtacatccttaaatttacggggcatcttatctttagacagagaagtgagcacagacccatctcattccaggacgtgctgaaccacccgcttcttttgacacttgccattgtgccagaggactgctctggggaggcatggggaggagtcacttggaagcagctccgggttgagtcctctaggaggaagtgtcagtttcttagccccactgcagtgaaggctgcagtctgtctttccttgaactgaaacactggggaagtatcagtgagggacagtgtgggtgggcttgtttgctctgtttttgctttgagccagtactcactgtgacccagccaggcatgagacatggagaaacaggtgtgtgcacccactcttggagttaaggtcttttaaaaaacgaaatggatacttaacctggcagctgatatatcatgttgatgaaaaactaaaatgatggccatttttgtctctattagtcgcaagacgttcccatccacttttatacttgtagcactatggttttcctttgaattctccccccaccccccatacacacagtttgtggtacagacagatttagaaaactaatgtggaaaactagtgagattggattcttatttctttttggtcccaggagtgaagccagggcccgtaccctagtccatgcacagctctgtcattgagctgtgctctgcctcgagccaggttttatttaattatgtaatagcacatgcctgttgattccacgtgtggtcggcaggagcaggaagaacaaaagtttaaggcttgcctaggccacggagtgacttcaaagttagttatgagtaaccttacgtttgttccctagcccccaaaccaaacgcgtacccccatagctgaagctcattgtgaatacccgaccgaggacaggcaaaggaggattttgctaaactcttttctttgacttaataaattatggcaaagatgaggcctatttgattagactccctcctcctcccaaggactcggagtcagactcctaggagagacttttgagccagttgtttttagacatcaccgttgtctttagaatcctttgttcttaataagaataattactttttttctgttcataaccccctcttttttctttctttctttcttagaatctgcagaagaagctgtcttggaacagtttgggtttcctttagctggaacagagacgaggcgttacactaaccacgccctgtcttacgatcaggcaaaacgggtgcccagatgggttcttgagcatatatccaaggacaagatcatcggtaggtggttggggagaatgtacgggtgctgatgaaagggtttccgtgtttaaaacaagagggctgttggtaatttcaacctttgtacctcatagcacacgttgaaagtgatgtttgtctgccctctgggaagcagctgagagctacatcctgacccacaggtagagagacaggaaaagaagagactgggtttagcatggggctttgccatctcaaagcctactcccagcagcacagctcctcagtgactcccccgcccccccaatccttctcatccttctccaccaggtccaccaggtggggaccagcatgcacgtatatgtgcctgtggaggccattctcattctaactgccacgttgcttaccaacattcatccctctcagagatctgtctgtggggtttctgggtgggtgtttatcatctcagagccaacagagaagccatcctccccctcccgagcagaacagacctctgtgtctgtgtgtgtcctttatccattcactcagcacagatcagcttgccagaatatagttttgtaaaacaatacacaagtgtctggttttgatggtctcatatatgaatgtttcatatatgaatgttttaattgttttgtacgtgagaggttcatataggcatgtaatgagttttgatcaagtccgtcccctccccccccccccttcagttctaccctgtccctttcacactatttccttataatttcatgtgttctttttcttaacatccccctgccccctccactcctgcccacccccactcctgccccccacctcccagaccacttagtgctgtcatatgtacgctggagtgtgggttgcttctcaggggccttcagttgctagtggctcgtaggtgagaagagggactttgtgacctccctgcccctttgttggtttgatcttgtgcgtgctcccgggatcctgtgagtgctcccaagatcctgggagctaacatgatggtgctttggagaacaagttgatttggtggtgaagttttatctgctcctcaccatttaccgtttccgcccgtacacggcccaggggagtttctggaaaggccagagtcagagagcgagaaggagcaccctgtaggagaagcatccatcctaggccgaccttactgagcccagatggaatatgagctgctttaggactccgaggcacgcatgtggtccctgacgccagccgtgcgcgtgaagctgtcccttcccacactagccaaccttcgagcctcagaggacccactgataaccatctgtgtgtttttcttcaggtgacgctgacagaaagcattgtaaattcaagccggatccttctgtcccttcagccttcagcgccctcaatgaagactatatcgggagtggctggtcacgaggccacatggccccggcaggaaataacaagttttccagtgtaggcatattttggagaggatgaggttgtgtgactgatgacctaggaaccaaattgtaaagctcaagaatgtccttgtctgtttttgggtttttttttttttttttttgtgcctttttacaattttaatttatgctcctttgtattttgcctccatgtctgtccgactgagggtgtcaggtcatgggcttcacttatcattttcacttgcgtatgttgaacaaacatttcaccactgagctacacccagcccctaactcattgttgaaacacagcagcagtagatctgacccagggctgccaggctgctgcaggtgggggggctggttagtcggtgaggcggagttttgtgcgcatagagtagatatgcagagagagtgcattacagtggccagaaactgggaggagagggacgtcttctctactacttttgaattaaaatttggttttcatgcctcttaaataaagttcctggaggttggcctggaggatgtgcaaagcctctgtttagtctccttttccctggaggcctttagtccttggagctgatcaacttgtgtttgggtggctgctataaataacaagaaaggccagacacacccaactacttgcgttatagttattattattataactactcaagacatatttatgtagcccaggctgggctagaacccattatgtagcttagggtgaccctgagtttctgatccccatgtctttacctctgaagtactgggctgatgggcaggtgccactgtgcgcagcatgcatgcatgcatacatacatacatacatgcatgtgtgtgtgtgtgtgtaagtgtacttttttttaatgcaagtaattttgtgtatattgtgtgtgtgtgtgtgtgtgtgtgtgtgtgtgtgtatgtatgcatggatcatatgtggaagccagaggacatctttgtagagtttgttcttaatctgtatgtgggttctgggtatcagattagggctaacaaggttgtggagcaagcacctttacctgcccagccatctcactggcctggaggcgttactctgcataaccatagttttctgccttgggatatttatttatttatttgtttatctaagcaaacatcagcgggtttggactgtggcctgagtggggctgtggctcggtgagtaggtagcatggagactagctgttagagctaatctagagcaaaggcattctagaataacaccatttcatttctcccttctcaggaagccatggcagaaaccttttacctttctaatatcgtgcctcagaattttgataataactccggctactggaacaggtaggtatggacggtaggcagcgtgcctcgagccggactgccggcttgcttgtgttgtctctgtgttcactcctcagacgccatcctggctgaacgctgctgtctctgctgtgtttgagagacagcctgcctctctggcccatgtgctactgctcagaagtcaggtttctctaatcaaggtagtactcctgctagggactgagtggtgcgtccaggaaagacacgttgttcccgagctttgcaggggaggcattgccagctgcccaggctgccttccagcctgtgactgtcctttctcgcttcctgattgctgagatgacacatgtgctgccccgcctggtctgcttccaagctttgcaagggaaaagctttggtgtggtaccggttcgacattttagtagtagacaccgggagaccgctgagccctctgctgcttctgacattgctaactttgccaggtggtcttaccaagcatccgaggagactgggatcgacccagtcctggctggaggccgccactcctctcagctcctcccagaatgtggttgtctcaggcaggtgcgcttctcctatgtagtatttcatagttcagaatacggctaagggtgcatgtagttctttggtagactacttgcttcaaatgcacaggggtcttgccttccatctctaccacacacacacacacacacacaaccctaagaagagaaagtgctatgtcagatgaggatctgggctcagtttctggcactgtgtggtggctcacggctgtagtgctaggtccagggggtccagggtccttttcaggtgatcgtatagttcacttatacgcaggtaaaatgcacatgtaaaataaaaagataaatctaaaaaaaaatgaactattaagaaaatgtccagccgggcgtggtggcgcacgcctttaatcccagcacttgggagacagaggcaggcggatttctgagttcgaggccagcctggtctacaaagtgagttccaggacagccagggctacacagagaaaccctgtctcaaaaaaccaaaaaaaaaaaaaaagaaaatgtcctatatttaaaagaggttggggctggagaggcagcgcagtggctaggagcttgcaggagacaggagtttgctcccccaaacctgtaccaggtagcccaggggtccagcaccctcctctgtcctctgtccacatacagacacacaaagaaccatgaaatgaatctgtaaagacttcctaagtcagggcccatgtgtttcatctgtgtactctaatccttaccacctgctcagactagaagatacgactttataaatggatgtttataggagaaaagacttgttttaaaaagtagcccacagtacttaacctactacacttaaaaaattaacagtagttccttagtgccagctgtacagagttcagatcccctgagtgtctctgccacagggagtcagaaggttccagtctaactcccaggtctcctcactcccgagtgaagcttcccctctcagcttggtaaagctctgggtagtcttccccttccttgtcattgttgtgtctgcagactgcacacctatgggagcctttcgagtttctttctcccgagggagaccttggtagagagcagcacttcactttgtaactaggcatccgcactctgggaggagctgagaggagtggtggcaggggtcgccatctgccgcagaccctctggatccctttgtctgcatggaatgggtctctggggcaggtggacaaggcgtcggcggttgacagacagaccaacacgaaagattgtgtagaatctgaatgtattgtgtcaggtcgagcatcagactttttataccaaaggaataacaagaagccaggcaacatacaatccaccgagttacagtgacgcaatacaaaaggaatgtatacatcaaaagaaggtggggaccaggctgctgccacaaaataagggagccaggtgcaaactaatctattgtaaaacccaccaccaggggttctgcactagcaggccttatcatgaatactgcaataccccaacaccctatttcctgggtctgcagaagaatataccgactcgcttttaatatgcaatgtaacctgtactgaagatttctatctcagtgagattccctggctctttctatgtagacaacaagactgatctctgacctatccagatccccctgcctctgccttctgggtgctgggactaaaggtgtgtgccacgatggctgtccctaagtcaacttcttaaatgagctgactcattcaagagtctttcctagggactgggtggcttgctgctttcttacgtgacacctgtgagcataaaacattgtttttgatttgtttttcagaatagaaatgtattgtcgtgagctgacggagagatttgaagatgtttggatagtatcaggacctttaaccttacctcatactaggaatgatggaacgaaaacagttagttaccaggtagggacgtgtaacattccagcgtatgttgttccgtgagctcgtaatctctttggatgctctgcttcatgtattcagcattgtttatcaggtgcctgctgctagggttacagaagcagatccagtgaggggtaaaaacaaccattggcagttaaagggaggcactcaccacccagctgtgttgaagactttcttgttcccttccttccttccttcnnnnnnnnnnnnnnnnnnnnnnnnnnnnnnnnnnnnnnnnnnnnnnnnnnnnnnnnnnnnnnnnnnnnnnnnnnnctcccctccctccctccctccttctttctttcgatttatttttatttattttatttttattttttcgagacagggtttctctgtgtagccctggctgtcctggaactcactctgtagaccagatccacctgcctctgcctcccaaatgctgggattaaaggcttgcgccgccgccaccaccacccggcttatttttatttttattttttttaaagatttatttattattatatgtaagtacactgtagctgtcttcagacacaccagacgagggagtcagatcatgttacagatggttgtgagccaccatgtggttgctgggatttgaactctggaccttcggaagagcagtcgggtgctcttacccactgagccatctcaccagccccttatttttatttttatgtgagtacactgtagctgtcttcagacacagcagaagagggcatcagatccccattacagatggttgtgagccaccatgtggttgctgggatttgaactcaggacctctggaagaacagtcagtgctcttaaccgctataagagccaccagcccctctcttttttttccgttcctgacactggaacacttagggaccatagagaatagacaaagtgtatgagaacttgcagtgacgtagagatagattgtacctactgccttggaaggctccagtgttctcgaaccttctccggaggagcgccttagagggctgacagctctaccaagagtgtgactgcatctctgtggagaggcaccctgagcattgtgccaggagtgtggcactgtgtggccatgcaggggagggacactcggtttggggaatgcaagttgggttaagtaagccaccagagtctgtgattggaggcctagggaacagctggaaaggtcaggagcagtggtggggtggggtggggtggggtggggcctgcttgcacttgcctgtgcttgctgtctgggtgtactgtgcgtgtctgtgcctactgctttcatgtgggttccagggttgggaagttcagtcattctcagaggtgctaaaggaagcaaaagacagcttcctcttctgaccaacttgttcatttaattttagtttttttttttttccaaattatcttagagtgaaagtgcctaaagctgtctgttattttaatttggaaatgtaattattcttggctttgcctaaatcctcttactcccatctccaggaaagactggtgacccataaatctgaaacgtttcactcatgttttgtgtgtgtgaaactgagagctttacgtaaataacctgctctgtaataaaatgttacacagcataaaggaagaactaactcaattcagagcatcttgctacatatttttattgtataagataatttttaaaactaaacatattttgatcatattctcttcctcccctgagtcctttcagatcatctcccctccctacacacccaagtttaagttctttctcaaaaaaaaaaaaaaacaaccaaagacctaacacaataaacccctcagaaccaaacaacataacaaagtataacaataccccaaaagataaacaaagcgtacattatatttatttattctggtgggctttatttttgctactgtgttgttccaattcaatagtggaaaacattcattttatttattgcttttcttattggatatgattttctaatctacaatttacaaaatcatgtgtccaagttctttgtgctaagagggcttcaaagcaatggtacaggcttttagctatcggcaggcagatcttgtcttctaaaagtcacctcttgttagaatatcccaccccccccacccccaccagagaagtgtctggttccctccagagtgccctaggaaaggaagaactcagacaaacggatcatcagaaggacacgggagcgagctgggaggtggtggggtcaagccgcctgagtctacaatcacaggcttcccgtatctgtgactaaatatgagagccagatatagtgtaaaccaactgagttacatcggtaccgctagtgagtgagtccacggggccagggcgctcctgactgacagctgtggagttgtcacgagtggaaaactttggaatcattttgtggccgtcacagtaacaatctattcaagcaggtgtcatcagtggatgccagtgtagcaggagttctgtgaggagcagggcttatgcccatcatcccataagtcgtttaatgatcagagaggtgagaaatataactttaacttccaaaccaaatgaccagcgctcttacctctagtaacgggacttactgataaaaatgccgtttctgcaaaaaagggtattgttcaattccgttgtgtggaaatagcaggtggaacccaggggaggacattataaaacactgcgtgctttctcaaagaaggggtcatgccatgaacacaaaggccagggaaccagctgggctggggtcacagacatggaaacaaaagtctgcagtgtggtttgaaggcagaaagcagggctgctggggcggtgtgtgggacacgtggaccatgcttggggtttggagaccagatagatgatgctactcaatttcctgatttttgtagttggtctgtaactgtgtcagtgaatgtctgttcttagacagtacatcctaggggatcaaggaatgagcctgtgacttagtttaaataagtttagggacaacagaaaggagaatgataaaggcatcaaggagaatgttaccagttggtggactgggtgaataatggagttcttagaccatttacaaagtctgaagttcaaaatggaaaaaatacaaagatgatgttctctggtctcagttttcattgcactggcacatgtgatgttgtcagtgatggaacttggccgttagtttatcagtggatggtgctcaagaggttcaagtagcctgaagagtttctggagatccgtcagccttcgtcccagtcatcagacgcatgaggccagccaggcttcctgaaagtgtgttttgagtgagggtcttggcttttgtttccgtcttaaagccttacttgtcctaggtcttcattttctgggcttctgagcccttaccattccaggtcttcaatgtctagggcctgtggatgtttagaacagcagagctttagctcagctttcttcaggggctgtcatgggggagggtggtgcacacctgtaagtgacagtcctcaagtggtattcttgnnnnnnnnnnnnnnnnnnnnnnnnnnnnnnnnnnnnnnnnnnnnnnnnnnnnnnnnnnnnnnnnnnccctccctccctccctccctcccttcctctgtgtgtgtgtgtgtgtgtgtgtgtgtgtgtgtgtgtgtgtgtttgggcttgtagggaagtagatgtaattctatgtcattaagttggtgccacttgagagacaagtacaacaaacgacagacacaggggacggcgaagggcgcgcagagaaccgccggtgccgtttctaagagtgtagtcatgtgctttgactttcagttcttttttaggggtggggaggttagagatggggcttctccacgcagccctggttttcctggaactcactctgtagaacaggctgggctcaaattcacagagatccactttgtctctgggcgctttcactttctagttgagatggttcaggtcatttaagcccttacctttcagacagagagatcagtaggctcctgaaggcgttatcctcggggtcctttagcttcctcgtccctccccgctccccccccccctcactcactatggtcatttccttagaacagttttggtgtgttgccctggttgttctggaagccttggaatcagacagtccttggagttcacctctcaagtagctggggcatacctcagctattcagtgcatttaaatcaagcttgagtgtgtacctggaagctctgggtgctcctcatacagagtgtaaaggtggccacagagaaaatgaatggtaatggacagttgatgagggagaggagggtgaggaggcaggattggtcacctggggagtcccaaccgcagagacctaggtaaagtgagggggaagctgaagtcgatgttaagagatcatggctctgtgcattccgtggggtggggactgcggggaggcgggacacttccaggaggtgtgggtgagtctgcgtctgcttcctgtgccttctcttgggctctcttccttctgtatgcttgcattgtcctattctaatgtgctggttttgttttatcttattttttttcttcgtatcccttagaagcccgtttgttttcaatgagagacagagaggaggtggatctggatgtgagggaggtggggaggagctgggaggagtgtgtgtgggggaccataatcaggatgcattatgtgagaaaaagataattttcaataaaagaaaaaatcaatttaattgggcaaaaaaatgtatttgtatgcacacaaatgtatttgtatttgtatggaaatgtatacgcatgtgtaatcttgtagtctcactaaggaaagcacatttgaggaaagatgagactggaagagtaggggaggggcagcctgttctgaagcagtgagcacatttattcagaggaggctgaagagatgaagggccggggcctggtgcagagatctgaacgtccagccagaatccaggcggctctccagcatgcgggaccttttagagatatcagttccagtcaggcattttagtgcacattgcacagccctcgagagctgactgttcctctcaaggaacagtgtgagcctgagcccccgctctggggtggtgcttggcagttaggcacgatgattccgagccacgtggctgctgcttgttttcagctgcacgcgctctgtccctcaggagaacgtacacagccaacgtgggggacgtcctaggtgctgtgcaggtgcggagcgtgtgcgagcgtagactctggagaagtgaagcagacgaactggtgtgccgtgagggcatcaggctacaaccctcaccaacccaaacgttgcggctgttcctttacacccaggaaaactgagggttgcagaggtcaactccaggtcacacagctcctcgttacgaggcgaggtccaagcctggctctgtcttttcccacacctgatgctcactctgtcagagcattgtcctttgaggctgtgccacagggacagctgagtgtccagtacagagcatgagtctgtcagaaatgaaaggcgttctcagtggaggccagttgcaaggagtatctgcgagcatgcagaaatagcagaaaatgggccaggagggttccttacagccaggcagagatgtccactaggatctgggagatggatcatagcaccctagaactgagtgcatgtggccctcagggagggcgagtagcagtgattttatcagaagtgagtcagctgacagctcgaatcagaatcgcccttagtatagctgaggctatccatgtgctttctctgatgtgcgcattgcgaaagagagtccagacaagggaagcaaacctgaagatttgggtttgaacgttgtaaatgatccaaggagcgtgctggtggtaactcgagcagtgtctgaagctccagatttctgccagttactcccatggagggagaaaattggaaacctggcccaggagtctggaggcatcctggtaggaaaggaatcgtcttcctgagaactagggaatgtttgtccctttccgcatctacctacttcctgagcagttccctgcaggtggaggctctattccgtttgaacagttgtagtgacacagggctgaccgacacactcctgttgacttccccctcctgggtgtcatctgtgcctcctccccccccccctcgtccttgtaggtgtgcatggatcccatggttttcaaactaccctgttttctttttctcttccatgtaattgccatttaacggcgtggtctctcagtgtgtctgggcaattttatttttggtctgactttcttcctctcctccttgtcttactggacatggtgtctgtcactaaatgcatttatcttaacgtcactcaagacacgatagctatgacactgcaagcagcaggctaagtctattcttttttgccaacttcttctgaaactggggtggctttgcagctatgacgggtaccgggtttctgtcactgagaggggaggaaggaggcactctgaccagtgtttaggaaacgaccaacttacatggagtccatcttctagctgttatatgtgttgtattttctactcacttccagtcggtcagtttccagtttttgttagccttgacaagggttcagggttcctgagtgttttaatggcgacagcgatctcctttgtaaagcacttgtatgccaaatcttctgtgaaaaggtttgttgctgatgtactgatattaaaagcttggttcctgttaagccacggcaagcctttgtccgcggtcattgtgttgaacttcgtttctccatgttgacctctaacgccctaatcttgctggagcccacggtgtccactctgccactgcaaaacctggcttctgaatgacatccacttcaaaaaataggttttttaaaaaataggtcttgatgattttgaaatctttttttgttgttgttgttttgagcagggtctcatatggcccaggctggccttcaactgctactcctccccccacctcaaggttctgggattataactatgcaccatcatacccgcaccccctttggaatcagggtctcactatatagccctggatggccccaaactcaaactcacaattatctcctgcctgttggttatcctcccctcccctcccttnnnnnnnnnnnnnnnnnnnnnnnnnnnnnnnnnnnnnnnnnnnnnnnnnnnnnnnnnnnnnnnnnnnnnnnnnnnnnnnnnnnnnnnnnnnnnnnnnnnnnnnnnnnnnnnnnnnnnnnnnnnnnnnnnnnnnnnnnnnnnnnnnnnnnnnnnnnnnnnnnnnnnnnnnnnnnnnnnnnnnnnnnnnnnnnntcccttcctcctcccctctccctctccctctctctctctctctctctctctctgtctcaccatatcagtctgctgtcggtacagtcctgtgaggggcatttggggattgctggtgctgttttagaaatgaggaaaggagcctggttgtgttatagtttatgacataagttatagcttatgacaaagtggaccctgagtaggtgtctgtctggtcagcagcctcatgcttcagtgcatgagttccagggacattgtctggcggtaactttcctgaaagtaaatgcttatgtgttttgctgagctacctataaggaaaagaaccctaagttattttaagattatttatgtctcaagttttttgttgtttttgtttgtttgtttgttttgttttgagacagggtttctctgggtgaccatagctgtcctggaactcactttgtagaccaagctggccttaaactcagagatccgcctgcttctgcctcccaagtgctgggattaaaggcttgcgccaccactgcctggctctaagtcccaaagttaaggaacagacactgggttatttaattttcaagcaggcacagtgtcttttgcgtgtgctgagaaaaaagtagactaactcagacaaggctcctcagaaaatgaaagtagattttgttttctatttacccgtggggaggtcttggccagaagagtcacatgttgtggctgtgaattggatctctgtcaaggactgatgtacagctgagggataggctggtgcccagcatccctgatgccctctggactgcagcactgggaatcctcaaactgtcatgagtctaaaaccccaaaactgtaaaacggcacggaagcaagtaaagccgggaagtggggtgtcagttatgggtacttttcctggaagtgaggggactcggttagcagttctgatggtcataccgtatgatgaccaggtagttatttgtgaaaaatgaccatttgtttgcggacagggagctcacaagagagacataggcaagagaatggtatagaaggatcccagggttttcatgctgtgttgcagtggcatggaaagcccactaggtggtgccaggacttggcttaccagccactgtgggatgtttgcagctcgtttcctaccgccttttgagtgtggctccatcgtagttatgtccttagttttggttcctgagcccttactgttattatttatcatgtttcagtatctggccacatgccgtggcagtcggctctcctgcagatagtgtgcttcagggttttgtgccctcctctttcctttgtaatgagattcgtagtccgggctggcctcgagctcttaagtgtatagccaaggatggcctagagcttatggccctcctgccttcacctggatgccaggattcctagctgcaccacctttttaccgtgcttcgggtcagtgctaggcctgggacccagagcatctgctggggttctgtgacccgagtgtgaacaccagcttaccttctcatccctttgcttcgatggtctcacgtcctcgtgcacagctcacccctgggagcgagatctcgaacctgtgagcagtgtggtttcataagccctgctctgccctgaccaaccaaccactttccgtatgttcaaaggcattgttgtagatcctgtggcagggtcttccctgaagtcctgtagctggctgtggtaatgtgtgacagacagaccatggaattctgggctatgtgcaatgcagataggagtttgtaaaaatcagggaaaacctcttttttggcttgcatctcgctgccttatttgggcttctgacagggaatctcatctacagctagaactgtctgacaggagagtaaccgactgacggcagcaaaggcctgctctgggcacttcgagcatgcccagttgggtcttgtcattttatcgggggccattaagcaaatggacatcccgcttttgttttttagacaacagatggaggcttttaagcatattggaaggacatttgaagaggcttcttaatcctgttatttcattaatacggccaacctacagagcggcttgtttctctgcctctgccttcctcattgtgtggctactttcctaaagtgtctgatttgacggcataatttagaagttcaatgtttggtaatccaggagcatttggaactaaacaaaagcagttgcatgtgagcgacgatcgaggtcatctagaaagttctgttgctactgtgtctggctgcagcttcaagggctgtctgttgtttcttggggcgtttgggctgtttttactgtaagagctgggagtgctgaagccagcagttctgacttctatgtttagagcgttaggagttctgattagccaatgaggaggaaatgacagtcccctttcccactggaagttcagtgcttgcttgtggcacccctttgtcctccgtcctgtggacatactgtgacccctgccctttggggtaacattatggttttttgtcgttattttgctccttttgagacggagtttctttgtgtagccctggctatcctggccaccctgtagaccaggctggccttgaactcagagatccacctgctttttcctccagggtcctgggattaaagcctggagccaccgcttacagaggtaacagtattttaaagactggttagaactggtcagtacttacgagttgtttgaatgtctttccttttccttggcagttggttgaatgctacactgaggcctttcacaggccgtttcctgtatggcatctacagaggtgtgggagcaaaacctgggaagtgtcggcacagcccagtgcgctaatcggactcctctgtttttaggtgattggtgaggacaacgtggccgtcccctcgcacctttacaaggtgatcctggctcgcagaagcccggaatctacggagccgctggcgctgggggcctttgtggtgccaaataaagccattgggttccagtcccagttatccgagttccaggtgagcctccatgacctggagaagatgtcaggtctggtgtttttcccccgtctggatagaagcagggacatccggaatatttgctctgtggacacctgcaagctcctgggtttccaggaattcactctgtacctgagcacgaggaagattgatggagcccggtctgtggccagactggagaaggttctggaagctttgaagagctcaggggtggaacctgacgattacttcctgagtcgctatgagaaaaagctggaggaactgaaggctaaggagcaaaaggacgcccagctggaaaagcagtcctagtgtctgtctcggtgtgcactgagcacctgtgaccaacaggtttattttcaagaaatgatggaattctgaccaaaatcctccaaagactcggggctcaaaactcagtgtcgtccttctctgggatccgaggtggctgagatggttttaaaactctgctctcacgtgctccttccctcatgaccctgaagtcctcccatctgtctgtgttggagaatccagtgactgttcttcctctgtgcaaaccctgctgtcccatcttacctgtgggcaagatgaggctcagagaactctgtatctttaccattggtattcaacagaagtcatccagggtgcctcagagtcaagacagagttagatggatgtaactcagtccgtacctgcatccacggctgtttctggcactacagccctcctggtgagaagggtgtgtctcttctcgcatcatttctgtgggaaaaaacagtgggtcttggaaagatggagatgttttgtgggtttaaccagagactgtggttccctccagggatcacatggtgccagataagtatgtttcttgcctcattggggcctttctaaaggagcccaagaaaggtgtttgccaagagtcgccgggtacctctggtcctgctgtctgctggaccagcacaccacaggtaggtatagcctgggcccaaggtccgaaccagctcattgcctggggaaagagcagctgctgtctgtgctgacctccagactggtttatacagatcttgagctgtcctgagtccatgcgcacagcccagaagcttctgggcaaaaggactcgtctgaatctgccactctgccactgtcctccaagcaatacgagagtgatctttgtggcattgtgtttgcctccgatagaaatgcatgactttacaataaagacaagaaggctctggctgaccctcttctgctccttcatttggagaaaaagaaactgtcaggtgtaggacacagtgacggattagctccgttctgcggtaccttcctcttccccattaacttgtgccagtccttctgaggatagaaagccaaaatgtcaccatgaccgaaaaaaaaatctgttactttctctcctcagaaaagaggtgatggcggggcctgagtgtttctccagcagccctgggaaggaggctgaggctcctcctgcctgtgccccaggttcccaccatgtgtttatgcagccgagctcctcctcctgttgccgtgctctcctctgctggcctggcttgctgctggctttggagttgcttcccacactctccctactcaggaagaatcttgtctgtatcagaaagtttctgtagcctgggattttatttcttatggcagatgctacctggccattgtaagacagaaataagagcaaaccaaaaagacagcacgcctgactgcatatttatttatttatttattgaatctgtatttcttatgagtgttttgcctgtttgcatctgtgcataccacacgagtgcctgttgcccacagaggttagaagagctcattggataccctggaaatggaatcccagatggttctgagccaccgtgtgaatgctggattctctgcagttgaatcggggttctctgcaagagcagccagtgctcttgagccccgatctcagattttatgtgtgaaatatctattgacatataacactgatccttgaattgtcctgtgaacatttgcattaagaggacccaaaacaaacacttaaaatggcccctcagtgtgactgtccgtttttctggattgcagtgcagcagattcctgggccatacttgagtatcaaatgtgtcagaggcagacgttgtagccagtcaaacctgagtggggtcactgtctgttcgtcacctcagtgggctccctcaggttcttgggctgagccttctgggccattcacccttccagttcctggtctgaagaaatgaccaggctgggttggctctgctgtgggaagtccctgtctcggggagggagatttaattcttaatctttcatcatttctagtgatgtcttcaagttctttggtctttggactaaggctgttggccaaagctgaatacagcaaaagccttactggaagttagagaggttagggagagggatgcgagcccctgaactgcgctgccatttctgctcttacatcttaaccagcagagacctctacccttctcttcggcctttgacgagtgcccagcaggagaggcagtctgctcttgagggaatggcttcctgcagagctgtgctcagtttgcagcctgacactggcatgatcctgtgtgcctccatgtcacctgtgcgccctgcctcatctgagagggtattgttgagctcactccgtttgtggcagacttcctgttaacggcttgtgaggggtaggatgtgccctgccaactgcacccacagcctgtgcacctgtgaaagccctgcagttcttgggagaggaggcctgactggtggaagtgggtcagtagaagcaggctttgaaggttaaccccctctcgcttcgggcctgtgtgctttgctttctgtctgccgccatagaaacatataaacctctggagactgctgttcctgttgccctgcctcccataccatagtggactggaatcccagcgctgtcggatcaaataaatccttcccgaagttgcttctgaccggtgattggccacagtgacaagtaatacgtgggtccccctgagcacgcgtgccctgtcctggtggagctgatgaggctggcctcacactgggcatggctgtcctgcacaaagcctcacatttagaaattggtcagcctacgggaggaggccaagcagggggctttgccctttgccgtgaacatcattggggacaatgcaatctgtcatggccattgccagtgtggggttaggcttgctctggtctgagagctgagttcctctaggggtcagtgtggtctcatctccacaagcgtcagctaggctgggcggccacagcctcgcagtcaggctagagcctgtggcttggcaggagacccaggttatctgcccggcaggtttcatgttttcactgcatggaagctagtagcttcattccctcagctttatgttcagaaacgtcaagcctacagaagtgttgttgcgtgtagtgattctcttccccgctgttttgtctcgttgttgcttttctacccgaaacctgttaaaattcatttgttggggctggtgagatggctcagtggttaagagcactgactgctcttccaaaggtcctgagttcaaatcccagcaaccacatggtggctcacaaccatccataacaaaaatctgatgccctcttctggagtgtctgaagacagctacagtgtacacacatataataaataaataaatcttaaaaaaaaaaaaaaagggctggtgagatggctcagtgggtaagagcacccgactgctcttccgaaggtccggagttcaaatcccagcaaccacatggtggctcacaaccatctgtaacaagatctgacgccctcttatggagtgtttgaagacagctacagtgtacttacatataataaataaataaatctttaaaaaaaaaaaaaattcatttgttgacccactacaaaagtaagttgagacgtgacaggtcactggttttttttttttttttttttttaaggcagggtttttctgtgtatccctgactgtcctaaaactctgtagaccaggccggcctcgaactcaaaaatctgcctgcctctgcctcccaagtgctgggattaaaggcatgcgccaccacatccagctgacaggtcacttttcatgcttgaacttaatgcagcctatgaataaggacattcttccatgtttccaaaatatgctatcaaatctaaaaagaaaaattaccaaaatttcttccaggtttggtacaagtctataatcccagcacttgggaagcagaggcaaatgggccatataagccggactgtgtaccgagatcctgtttggaaaaagaaaatttggaagaccctttcacaggggtagcctaagatcatcagaaaacacagaaattgacaggatgacacataacagcaatgttacagtcatgaagtagcagcgaaacaatttcatggccgaggtcaccacaccacgaggtactgtgtgaacggtctcagcactgggaaggttggcaacccctgatccggagcagtgtatcatctatttgacttaaaaaaaatatatatcccttacctactccttgaggttttggttctggaggtctgtcatgaggccggggtcgacattttaacaaattattttaagtgtgtggttgttttgcttctgtgtgtctgtgtaccatgtacatccctagtgcccaaggaggttaggagggacaggtctcctgggactggagctatattgtgagcggccatgtgggtgctgggaactgaacttagattctttgtgacagcagccagtgctcttaaccactgagtcatctctccagtcctcgtgtgtgtatgtgtgtgtgtgtgtgcgtgtatgtatgcatgtgtgtcagtgcatgggtgcgtatgcatgcacctgtgtatagctgtgaggacgtgcatgccaccctgtgagttgtgtagatcagaggctgacctcgggtgtcagcccttgccttctgcttcgcttgaggcagtctcttgttgattttaccaggctaagcactgggcggcttgaaagtttctggaggttctgctttgtattttgccttaggcatgctgtgtacagatgtgttgccacatctggtcttccgtgtgctgaggaattggctcttgggtcttgatacttgtgcacccactgagcagcctcgccagccccggaatatgtcatttaaaaagaacactgattgtgatgagccccggcggggcttcaggctgttccctgacaccctcgccttcctggctgatactagcttttgcctgaggtcctttcagggcaggaagctcacaaagacgtgggagcagcggactttacacgcttgtacagggctcttcccagtaaagcagtcaggatgtgccgcgttgagtccaggaagtggctggtccctgaagcatagtccagttttctcaccgtatactgtggtacgagtggaacccactccaacaagctgctccaggtctttcaactgacccgccgtcaaatcagcagctcaccacacacccacatgtcagcgcgtggatcacaagagggagttttatatacgccaactgttcagctccttggtacaatctctacccacctcaaaggagttcacgtttatggtagtccagtttcatctcgccgacactgccaggctagctgtgcctttcagctttgtgctgcagattgaacaaacaggccttcagtgtgattgtttaaaaaaagcagtggtggagacaaaaagggagagcctggcggtacacagtccgtcctacacggcagccggtattgtacatgcgcccatttcatgtaagttcttatttgtttccgggcaaggtatctctctgcaagttcaagaccagccagtgcctgctaacatagagagaccctatctcagtaacaataatgaaaccaaataaaaaccaataataaatttatgtacactatagaaacgggtccccaggacagtagtgattcactccagggtgggacctgtaggcctgtaggatgtggctgggtcaaggctttggagatagggcatgaggtggggacccatcccatcttcccgtgcttcagcaggacagcctcatctgccgtcatccctgagaatgaggagcctcatacaggaacagagagaggattggttgaggatggaatacacagtttgcaggttgatgagttcttaataaggggtagctagttacctgtcagcttgcaggcgacaggggaagaccagtgaggcgacgggggcagtgtatgatgtcaagctgggcaccaggcagaagcagctctgcgaccataacacgttgctgcacaccgtatcactgctcagctctcagagccccttcccaggagagcctcttctgggtaccacttaggaggtactgtggggaaacgcaaatctagagtgttctggctttccagcctgtggtctaatgccttccctctgtctcccaaggttcttctctatctcatctggtttccgttcagtccttcttgtgtccacccagagccccgctaatgtgctagaggcagacacgttagcgtcaactcctttctggggtccccatcgaaccctacagataataacaggttacatgttttggggttacccaacaagtcagagaaacagagtgaattctgttgagtcctaggggtcccagtaaggctggggagggtctgagtaccgtagatgacgggctttgagaccagaattgagcgctgccaaccccgtggcctgactcttgaggtacattcttgcccccttccccccgtccccaagctgaaggctctgcagagttccatctctggcctgagagaatccttcctggtgggacgatgagaccaaggcagtgagtgtgttgagcagggactcgggactgtgtgcaggtgtgaagccccaccttcccttctgccccctgcctggatcccagcatgtgcctgtcaggccggatgaaatgtcctgcctctgcgtcctttctacccagatgtcctctagagctgtggggacaggggcaatggtgggcattggcgggcagtggctcagttcctggacacagctggttctttgttcaccaccagacaggacagtgttttagttccttcccactgctcacaagacgaccctgctttcctctggccatcagtgcatgtgccctgaatctgccttccccaccctctcaccccttgcctgccactgccctttgataccgtgagggagacctgctttagactgtgggtggagatggagcactggccatcttgtcccaggggagccagcacagcgtgatgtcacctgccttctttccctgtgtgggtctaaaactcaggccgacacacaggaggtgtgcgcctccctcgccctgcagagcctttgagttgtaggctggggcttggacccttgcatgtctgtctggtctggggtcagaacctgggctctgactctggcttcttagtgtgttgtgattttactcctgttctcctccctgttaggtaaagaggggggccagccggtctccagggtccctcccgacttggaatcctgtagttgtgcggagcagagccttgcctggagaaagcctgcagggttggtttgcagaggaggcatggtgatgcaggtggaggccgcaggggcagagtggctgagggcctctgaggaggtgtgaatgagggaggcagagcagggctggtgtggacagccctgtcccaactctatctcctgtcccagacaccctctccacaccccagccctgataagcaggtgtgagccatggccgccttgtgacaggcccttctgcagggaggatgatggcgggggtccacttcacatctgaattcactttagcatctttctttcctctcatccaccccccccccccccaaggaactacacagtcccaacggcacggctttattcctgacctcagccttggctctaagatgtccttttggctgcctggtgcccagtgaggagtacgtctctcccaggtctctggcaaagtgcctaggagggtagtcacccatcccccatccccagggatggttcctgcaatgacccctgttgctggggctggcacatccagcgtttcttatcacctcaatgactggtcctcttgtctcctcagtcagctgccagccatacagccactctgtctgggtctgcattttcctctaaggtcctagccattgcccagaaggccatttcacaggcctgggaggtggctcggccggtaacggtatttgctgtcaaacctgacaagctgagttcaatctgcaggatccacatggtaggagagaacaaaccctcacaagttcctcacatatgatatggtgcgtgtgcgcacacgcgtgtgcacaaacacacacacacacacacacacacaccataataatatttcaaaaggtcaaggccccttgttggtaggttcatgagaatggaatgggcagagaagtcttggtgaaagaaatggatgttcggagctctcgaaaagacaaattattgctaagccagaagccacggaaaaccctcaggacttagggtctctccaggtcctcgttcccctgcactctaaaccctccaggcttagggccctaagctgaaagtctaccttctaaaatcctcaggcctgaagattatctccatctttcagactgcaaacattctgtaccagacagctgcgtgtgtgtgcgtgtgcaagagagggagagagagagagagggggagtgagttagttgctctgtaggcttgtctgtatttccacactcagcttcctgcacagctcaagagacagggcagtttcctggctaagagcacagactcaagtcagacaggctgacttggtgtcacatcctaactttgtcattttagcagataggaaagctcgggcaagcagcttaatcacattgtgcctccattccaccccctgtaaaccaaagctcctgattctaatgagagccagctccattaaaccaggacaccatgcaataccgagtggaactcaaatagtgcccttagcgagcaccatgcgactggtggccactaatggtttagtaaatcttattctaatgtcatgacaaagtcaaggaaacactgggggaattcccacaagccttttatgcaggccaccaccatctgttttattctgagtttatcattctgtccccatacatagtctcttcattgtacgtctgtatataacactgtatgtaatataatgcatttttctgaattctctaagttgaagacaatcatggtttctgtcaccttctaaattctccattatctcttggtaaaggtctactcgtataaagccgcagtgcagggatctaacatggatccgacgccgctctctagaccacggctcttacctaatcggggcactgggtcttttctcttctgtgtctgtcacttgtgacctctggggcacccattgcacttaattgtcacagacctttaacttccttcaatctggaagagatcagcacctgttctttgtgtgtcttgaacttgacatttggagagcgcaggacagcagttttgtagactgccccctgctcggatggaaatttggtgttgtctggtagtcttaggctctgcattttgggcaagactgtttgctgcacaggtgatgttgggcatccctgattctaggcagctcgcaggatccttttctactctttggaaattcgaccattggttgcctggtttcagcagaatctgccaagtgcacctttttctttgttctgaacacataattatggggaactatggggaccttctgctccttaccgactttccccataggtttttaccctattttaagttcccagttggctcattcaaatagctcccgtgtcctttgacatctctcatcattcttcgggcacttcatgttctagcacaacatgatgttccaggcacattgggtaattttttttttctgctctaactctgaattagccatttcacaggagtcctggttctttttagtggacaatgacactagaaaccaagatttagatgctgatatgctggttgacactggtgtgtctctgcttctatttgatgtttcagtgtgcttgtccgataagcactcagaggtgggaaactgctatagaaaatgtagcttaagtaagggagtcaaaatgggatggcctgtgtgaggctccagcccttcctgcttccttctcttccctcttccttccctcctctcccctccctcaaccccttccctccaatcccttcccnnnnnnnnnnnnnnnnnnnnnnnnnnnnnnnnnnnnnnnnnnnnnnnnnnnnnnnnnnnnnnnnnnnnnnnnnnnnnnnnnnnnnnnnnnnnnnnnnnnnnnnnnnnnnnnnnnnnnnnnnnnnnnnnnnnnnnnnnnctcccctcccctccccttccccttccccttcccttctctttcctttccctcttcatgacctcacctcccctttcttagtcaagcattcctttgggcattccagtgtagaaacctctgaggccgtttccccagctactcgcgcgctatcagaggcagacaactatgcgacctttctgtgtgaagagccaaaggcaaagataattcttgagaaagtttgtgcttaggacaatctggtgacaaggtgatggggaagacgcatttggaaggtttccacctggaagtgatcctttcttctgcaggaaagcactcagacctaagcccgcacgcacggccattggctttgggcatccatgggggggtctgctcgccatgtgggcctcaggagtctgagaatcagctagcagggtttaaatgctggcatctcgctaatatcacaggtggcagggacagtggaggtcagaaatgacaatctattgaaggccactcaaatgttttctttgattatgcaactgtggaatgggtggatagctgtaatttcttccttggttaactcttctgagattagactcaaagtttcctcttctctgaggtccctgaaacaggtagacaagaatccaagagcctcttggaagaaggctgcctcctggagttgagtaaaggagtcctgttgagctgtagccacagaacccctgtagagttcaaaggacaacttgcaggattctcttctttccaccatgtgggttttagagattgacctaaggtcatttggcttagaagaaagcacctttagcagctgagtcatcttgctggcccatgttttttctgaattttaagacagggcactctgaccatgtaatctcaggctggcttcaaattattgtgtggctaagctggccttgaacttacgacacagtgcaggctgaccttgcctttgtgatcttcccagaccagcttcccaagtgccattgtgtcacctcgagtgcgttcttgactggttagcagagcaggtttgcacctttgctctgtgtgccgaggaggtgaccaatgcagctatgttcacagcaccagagaagccagtgtttgtcccgcccacggtgctactcctacgctgcctccaacaggagcttgccttattagagttcctgctggaagaggcagggtccagcagttgggaccttaaactaattctcagaggctcagcagttcctcttgcagtgtcaggggcagctaggatctccccagggagtcatgaggagacacttggcacctcttcatctatccataacctaaccaccgttgtgtctccacggagagagcactgactcatttctcacccaccatccttgccttgcacaattccttccacagagcagaggtagcgtcttgctaaagcacaggcctcatgagcagccatgcccttcacccccataaagagaagtatatgaaggagtgagcccctttagcagccccacacgcctcaggtcatatcctctcctggaccttgccagcatgcgccaccccttatctgccggctctgtccacatgggccaagttgcccgtctggaatgggtcacatcccttccacttcagaacctcacattcttctctctgcctgaaaacgcccacagggtcaagtccaatgccacagcatcaaaagaggtcttccttgactctgccccgaatgttgtattagtcagtgttctcatggtggtgaccagataccaagcaggaaatggcatcaggggtgggggagagcttgtttttgaaggtgcagttggcatgtgggaaaagacaaagtgataagaatagcccttggccatggccacaggaatatcaacctgcttgctcatatctgcgtacataggtcgggaagcagagaagggaacgtttggctcaacactccccccccgcccccttttcttttattcagtccaggccccccagcctctaggacggggccactacagtcaggagttccctgtcttcagctgatcctctctggaaaggtcgtcacagtcacagcctcaagtgtacctcagtaattcgcaaagtgtttattaatcgtcacaagccgtgtcctccctgcctggcagcagctacaggcagtgctggacggtcactcacctccctgacttgactgtgagctacgtaagggcaaagacaagcctgactgctcatcactgtagcatcagactctataagatgctctgatcatgcaggaggtgcaggcagatacctcagcctccccagctagctccacgtgtcggactttatttggtgacatttgaggaagggagggagatccctgtggctctggggccttctgccagtgtggttgctagcatcagccctgatggctgggcttcagcgccaaaccgctgagcacatacccttcacaggtcacagtcacgctctctgtaggagagggaatgctttgtcaggctggcgaggcaggcagatgtgtgacctcccagccctggcctggcctggccgctcttcagctggaaaggagattgtcttttaggtcctcaggctagagcctggaggcagtaggttctgggggtggtacccgggaggtagctggcttgggaaagaa

SEQ ID NO: 1175 - DNA, 792 bp, Mus musculus
gcaaagagcttcgcttcccgtctcagggactcgcggcgatttctgaatggcttcttggccggggctgtagtgggcgccgcgggagcggggctaacggcgctgcagtttttccggcgtccggacgcggaatccgcgaagctggcgaggcagccacacggtgcagcacagtgcctggtacagaattggccttcaaatctgcagaagaagctgtcttggaacagtttgggtttcctttagctggaacagagacgaggcgttacactaaccacgccctgtcttacgatcaggcaaaacgggtgcccagatgggttcttgagcatatatccaaggacaagatcatcggtgacgctgacagaaagcattgtaaattcaagccggatccttctgtcccttcagccttcagcgccctcaatgaagactatatcgggagtggctggtcacgaggccacatggccccggcaggaaataacaagttttccagtgaagccatggcagaaaccttttacctttctaatatcgtgcctcagaattttgataataactccggctactggaacagaatagaaatgtattgtcgtgagctgacggagagatttgaagatgtttggatagtatcaggacctttaaccttacctcatactaggaatgatggaacgaaaacagttagttaccaggtgattggtgaggacaacgtggccgtcccctcgcacctttacaaggtgatcctggctcgcagaagcccggaatctacggagccgctggcgctgggggcctttgtggtgccaaataaag

SEQ ID NO: 1176 - protein, 262 aa, Mus musculus
  VARIANT (1)...(262): Xaa = Any Amino Acid
KELRFPSQGLAAISEWLLGRGCSGRRGSGANGAAVFPASGRGIREAGEAATRCSTVPGTELAFKSAEEAVLEQFGFPLAGTETRRYTNHALSYDQAKRVPRWVLEHKDKIIGDADRKHCKFKPDPSVPSAFSALNEDYIGSGWSRGHMAPAGNNKFSSEAMAETFYLSNIVPQNFDNNSGYWNRIEMYCRELTERFEDVWIVSGPLTLPHTRNDGTKTVSYQVIGEDNVAVPSHLYKVILARRSPESTEPLALGAFVVPNKX

SEQ ID NO: 1177 - DNA, 580 bp, Mus musculus
atgcgtggcagagacaaagtgctggcgcccgcgagtcatggctgcaaagagcttcgcttcccgtctcagggactcgcggcgatttctgaatggcttcttggccggggctgtagtgggcgccgcgggagcggggctaacggcgctgcagtttttccggcgtccggacgcggaatccgcgaagctggcgaggcagccacacggaatacccggaggcctgcttctcaggtgtttctagattctgtcaaattgacaacatcacaacaagaatgtttgaaggcgtttccgtaaagaatatctgctacccagtcttcctaaatctgcagaagaagctgtcttggaacagtttgggtttcctttagctggaacagagacgaggcgttacactaaccacgccctgtcttacgatcaggcaaaacgggtgcccagatgggttcttgagcatatatccaaggacaagatcatcggtgacgctgacagaaagcattgtaaattcaagccggatccttctgtcccttcagccttcagcgccctcaatgaagactatatcgggagtggctggtcacgaggccacatggccccg

SEQ ID NO: 1178 - protein, 100 aa, Mus musculus
RRFRKEYLLPSLPKSAEEAVLEQFGFPLAGTETRRYTNHALSYDQAKRVPRWVLEHKDKIIGDADRKHCKFKPDPSVPSAFSALNEDYIGSGWSRGHMAP

SEQ ID NO: 1179 - DNA, 372 bp, Mus musculus
ccgtctcagggactcgcggcgatttctgaatggcttcttggccggggctgtagtgggcgccgcgggagcggggctaacggcgctgcagtttttccggcgtccggacgcggaatccgcgaagctggcgaggcagccacacggtgcagcacagtgcctggtacagaattggccttcagaatacccggaggcctgcttctcaggtgtttctagattctgtcaaattgacaacatcacaacaagaatgtttgaaggcgtttccgtaaagaatatctgctacccagtcttcctaaatctgcagaagaagctgtcttggaacagtttgggtttcctttagctggaacagagacgaggcgttacactaaccacgccctg

SEQ ID NO: 1180 - protein, 69 aa, Mus musculus
PSQGLAAISEWLLGRGCSGRRGSGANGAAVFPASGRGIREAGEAATRCSTVPGTELAFRIPGGLLLRCF

SEQ ID NO: 1181 - DNA, 3812 bp, Mus musculus
tgcgtggcagagacaaagtgctggcgcccgcgagtcatggctgcaaagagcttcgcttcccgtctcagggactcgcggcgatttctgaatggcttcttggccggggctgtagtgggcgccgcgggagcggggctaacggcgctgcagtttttccggcgtccggacgcggaatccgcgaagctggcgaggcagccacacgaatctgcagaagaagctgtcttggaacagtttgggtttcctttagctggaacagagacgaggcgttacactaaccacgccctgtcttacgatcaggcaaaacgggtgcccagatgggttcttgagcatatatccaaggacaagatcatcggtgacgctgacagaaagcattgtaaattcaagccggatccttctgtcccttcagccttcagcgccctcaatgaagactatatcgggagtggctggtcacgaggccacatggccccggcaggaaataacaagttttccagtgaagccatggcagaaaccttttacctttctaatatcgtgcctcagaattttgataataactccggctactggaacagaatagaaatgtattgtcgtgagctgacggagagatttgaagatgtttggatagtatcaggacctttaaccttacctcatactaggaatgatggaacgaaaacagttagttaccaggtgattggtgaggacaacgtggccgtcccctcgcacctttacaaggtgatcctggctcgcagaagcccggaatctacggagccgctggcgctgggggcctttgtggtgccaaataaagccattgggttccagtcccagttatccgagttccaggtgagcctccatgacctggagaagatgtcaggtctggtgtttttcccccgtctggatagaagcagggacatccggaatatttgctctgtggacacctgcaagctcctgggtttccaggaattcactctgtacctgagcacgaggaagattgatggagcccggtctgtggccagactggagaaggttctggaagctttgaagagctcaggggtggaacctgacgattacttcctgagtcgctatgagaaaaagctggaggaactgaaggctaaggagcaaaaggacgcccagctggaaaagcagtcctagtgtctgtctcggtgtgcactgagcacctgtgaccaacaggtttattttcaagaaatgatggaattctgaccaaaatcctccaaagactcggggctcaaaactcagtgtcgtccttctctgggatccgaggtggctgagatggttttaaaactctgctctcacgtgctccttccctcatgaccctgaagtcctcccatctgtctgtgttggagaatccagtgactgttcttcctctgtgcaaaccctgctgtcccatcttacctgtgggcaagatgaggctcagagaactctgtatctttaccattggtattcaacagaagtcatccagggtgcctcagagtcaagacagagttagatggatgtaactcagtccgtacctgcatccacggctgtttctggcactacagccctcctggtgagaagggtgtgtctcttctcgcatcatttctgtgggaaaaaacagtgggtcttggaaagatggagatgttttgtgggtttaaccagagactgtggttccctccagggatcacatggtgccagataagtatgtttcttgcctcattggggcctttctaaaggagcccaagaaaggtgtttgccaagagtcgccgggtacctctggtcctgctgtctgctggaccagcacaccacaggtaggtatagcctgggcccaaggtccgaaccagctcattgcctggggaaagagcagctgctgtctgtgctgacctccagactggtttatacagatcttgagctgtcctgagtccatgcgcacagcccagaagcttctgggcaaaaggactcgtctgaatctgccactctgccactgtcctccaagcaatacgagagtgatctttgtggcattgtgtttgcctccgatagaaatgcatgactttacaataaagacaagaaggctctggctgaccctcttctgctccttcatttggagaaaaagaaactgtcaggtgtaggacacagtgacggattagctccgttctgcggtaccttcctcttccccattaacttgtgccagtccttctgaggatagaaagccaaaatgtcaccatgaccgaaaaaaaaatctgttactttctctcctcagaaaagaggtgatggcggggcctgagtgtttctccagcagccctgggaaggaggctgaggctcctcctgcctgtgccccaggttcccaccatgtgtttatgcagccgagctcctcctcctgttgccgtgctctcctctgctggcctggcttgctgctggctttggagttgcttcccacactctccctactcaggaagaatcttgtctgtatcagaaagtttctgtagcctgggattttatttcttatggcagatgctacctggccattgtaagacagaaataagagcaaaccaaaaagacagcacgcctgactgcatatttatttatttatttattgaatctgtatttcttatgagtgttttgcctgtttgcatctgtgcataccacacgagtgcctgttgcccacagaggttagaagagctcattggataccctggaaatggaatcccagatggttctgagccaccgtgtgaatgctggattctctgcagttgaatcggggttctctgcaagagcagccagtgctcttgagccccgatctcagattttatgtgtgaaatatctattgacatataacactgatccttgaattgtcctgtgaacatttgcattaagaggacccaaaacaaacacttaaaatggcccctcagtgtgactgtccgtttttctggattgcagtgcagcagattcctgggccatacttgagtatcaaatgtgtcagaggcagacgttgtagccagtcaaacctgagtggggtcactgtctgttcgtcacctcagtgggctccctcaggttcttgggctgagccttctgggccattcacccttccagttcctggtctgaagaaatgaccaggctgggttggctctgctgtgggaagtccctgtctcggggagggagatttaattcttaatctttcatcatttctagtgatgtcttcaagttctttggtctttggactaaggctgttggccaaagctgaatacagcaaaagccttactggaagttagagaggttagggagagggatgcgagcccctgaactgcgctgccatttctgctcttacatcttaaccagcagagacctctacccttctcttcggcctttgacgagtgcccagcaggagaggcagtctgctcttgagggaatggcttcctgcagagctgtgctcagtttgcagcctgacactggcatgatcctgtgtgcctccatgtcacctgtgcgccctgcctcatctgagagggtattgttgagctcactccgtttgtggcagacttcctgttaacggcttgtgaggggtaggatgtgccctgccaactgcacccacagcctgtgcacctgtgaaagccctgcagttcttgggagaggaggcctgactggtggaagtgggtcagtagaagcaggctttgaaggttaaccccctctcgcttcgggcctgtgtgctttgctttctgtctgccgccatagaaacatataaacctctggagactgctgttcctgttgccctgcctcccataccatagtggactggaatcccagcgctgtcggatcaaataaatccttcccga

SEQ ID NO: 1182 - protein, 376 aa, Mus musculus
CVAETKCWRPRVMAAKSFASRLRDSRRFLNGFLAGAVVGAAGAGLTALQFFRRPDAESAKLARQFSAEEAVLEQFGFPLAGTETRRYTNHALSYDQAKRVPRWVLEHKDKIIGDADRKHCKFKPDPSVPSAFSALNEDYIGSGWSRGHMAPAGNNKFSSEAMAETFYLSNIVPQNFDNNSGYWNRIEMYCRELTERFEDVWIVSGPLTLPHTRNDGTKTVSYQVIGEDNVAVPSHLYKVILARRSPESTEPLALGAFVVPNKAIGFQSQLSEFQVSLHDLEKMSGLVFFPRLDRSRDIRNICSVDTCKLLGFQEFTLYLSTRKIDGARSVARLEKVLEALKSSGVEPDDYFLSRYEKKLEELKAKEQKDAQLEKQS

SEQ ID NO: 1183 - DNA, 65868 bp, Homo sapiens
  misc_feature (1)...(65868): n = A,T,C or G
gtgtaaagtgcacccatcaggtggtatatctggttctgatggcaagaagaaggtgggggatctccttatagggcatgggtctaggagcacagatgggccttttgccccgggtaaatgtttgtctgtttgctgtcatgtgttctttgaggagtgagccatctcgagccctgctttgaatttactgggtcatagagcctctgcctgtgctcttttccataatgacttcatgtgacatgcacttttggtgggctcagataattggtttctttttgtttttgacctcaggctctgtggcagactggggaaaatggggcctggcatcattttccctgtcaatgggaggggctgttccatgcagggtgggaggggaccaagttagcagagagtagccaaggatccttgcttcttcctttctagtgtgctgtcatccaagcaggctcctggctgtagggatgggccttggggaagaatcttctttgaaagcatctatgataactgagaagtcatccctagttggagaaatccagtaatgagcagaaggaggaagcaagtgaggacagaggccattgtattacagtgtcacgcagagggccctcaatgatggggcattggggaaggctgtagacatagtcatcagaacatcctggcctggcataagctgggttttctcctgggaccattggtcctcagcaggagttctttgcatgagttgctcaggggcaagggctgcaagtgggctgttcttaggagaaagtgacacctggcagtgagggaagatggtgagcattattagcctttgttgtccagcatggccttcttgtcctgtctgctctggagaggagcctgtgggaccagtcctgcctggggagggcatacccacacgtgccagctgattctgactctgaatacatcatgtccggacttgggggtgtttctgcagaaaaaggaggttgtttttcagccttgaacatcttcaggaggatagagactcttgctcacatattcttagcaaagggaagggtctctcatctccaggccacagagatagttcttccattgccctaagaggctaggctaaccctcttgacataacttagacagcaaagcacttcatcctgtagttgggctctgtcacctttctcttcagttggccacattctcgtttcctccatcctgctatgctttgtgtgctcgggctgtgtgtggggtttttccctggtggaaggaagcccagctgtgtattgaatgtccttcatgtgttgtgtgtggctcagaaagcctgtcacttggcccctgtgctctgagccgtgagggtggggaggtggctgttccattaaagtgggagtattggatggccctcttgaaactagaattttgccttttttagtatgcagtataaagtttccagcatctattggtaacacaaagatttgctggtttttaaaataatacagtaagcataagtatgtaagtttttagaattggtactagaagttggacagctagttattctcgagaactttatttcactagaaaaatatactaattggaaagcagtttccaggagttaactcagtttaattttcagtctcagttattttagcctgttgagtttttgatggcacacctttggagagatggccaggcctgattcccatttcaggggcatcagaccatacctttttaagaagctccgtgaatctagtcatctacccttcatcctgggcgaacagccaaaaagagaaggggacaaggtgtctttttctccttctcactggggtgacatgaattcttttagttaatggctgtttgcaaattctaaactaatgaaatacttagcagctaacatgttcaatctagtaatgatgagtttaaatctcaattgacagtaatgttttagataaacaggcccagtaattcagttgatgaactgtatatcttctcagtctagatttgtaaatgtttaatgaattcagggttataagcatagttctttaagtaagattccagatagttgatttgtaaccagtagtctacctatgaatgtatcccaaacctttagaagattggaaaagatttttgaaataatgatttagttttgtaggaaaaacacccccttgaaaattaattcggttgacccagtaacattttttaaaacaattggtggctccaaaaggcctgccaacaaagaaaagtccaaattatctagtgggacattttgaatgttttatgtttattttgggtccactgtaaactttggttcaaaaaagaatttgaatttaaagaatttaccattatttaaattattaccaagtttttacattttcatgatggtattttccaggtatgaatgaaacatgactttttgattgtggtacttcctgtatcccctgtagtgccaaaaccagtgatactttatttgctcctatggcagctcatagaggtaaccgaagtgatttttcctcagtaattgaaacacatattctctaaatgccaatgtgtggtgatgggccctgcactgccttcatttctctagggcagtgtctttggattgtctagggcctaggtaattctgagaactactgtaaaccaaccacagggcactaaagcaatgtacacaccactctttgtgtgtatggaaggggttatataaacctgggctatgctggacatctacagaagagtattacattcacttgcaaagtttacatttttgagctcacagttatgaaaaatatgacccacaagtttttcaggcaggtgaggatgggtcttcttgcaaatgcatgagttctgtcttgagtcctgggaacttctctgttggttgagtgtgggctcattccctgactctcctaatcatgtttgcgtcagaatgttagcattgtaaataaaagaataggttgtataatagatacacaacacttgaaactttactttaaaaaaatcgatagttctacatatatatttagttatatcacttgacagatttcttctacacagtgtggagattgttttataccacagattatttttataaagttagtgaatttgaatgattttgtaatcagagctaatgagctttacctttcaagagaaacgtacactggagcatgagtggtgtggaacttttacttagtgtttatatggattcttgtgatacactggcagactggagtcaatttgcgggtcttttttggccaaaactccacttgtggttgtgtaggacagtgatattcagctcagcttcttgtggattgggaggagagagggcctgcaatgtgttttacattggtgcttcctcctgagatttctgttgaacaaagggttctgaggtcaaaaattagtttgtaagcctttgccataggacatagtcatgtgagagtgtttgggggaacagaaattgtataggggtgccgattggggtgggatgggactcgaataagattcaggtacaaaaactttgaaatgagaatctggtggtttgagtaatccaccagactgaattatctaagatcacattatccaggttggggggcagaattacccagttaagtaattgttcagaaaagtggggagggtggcatgtggatgcagtgatccaattaaatggagagctgccaggcacattttgtcctctctggtcagtgagaatggttgggttggctcgctgcttcaatctgtggaatcagccaggagcccagtgaggaagctcagaaccccagtaacagcagagcatctttcagatagctccagagttttcctgcttttctgaggaagctcagcatcactgccacaatacggaaagtggtcttcattttagcctatttatttttaggcagagagtggatggttatttgtgtgggacttttggtggcgatatataatgaataattaagttaatttctggtatgcataatggccagtcctgaggcccagctgaagacctgtcccccagaccctgcccgctggcttcaggctgctgcttctagacagaggtgcactggacgggatagttttatcaagagaatccctaatgtgtcattttaaaccagctgtgctttttattcattctggttgagcgtataggtttacactttaccctttttatacttggaataaatttagttccagcagatctagtagcactccagaaaccaaccccatctgttccccataaaaagaacattttctctgctctccagccacgtgtcttggaatgtaattctgttgtgcctttgtttttatcactctcttcgccccaaaagcaactgctgtaagcttttttctacttgtcttttctagtccccaacctctacctttttcctttttcccagccctaatttctggatgcacttctgtgatccaggtattttaagaaccagttacctcagacctcatgttgaacagtgtcgccatctgggtcctcttgatactgcagacttttaacgtacacatgcaggaaccctgctgagcgtgggcacttgttttaaagcaaaactcttcccaaggactgaagaaagggcttctggcaagctcgtcatggcattgtggtgggatgggtctagagtgtcatctgaatggtgcttcctgtgttcctctttgaattctgccattttcagtattcttgtgtgtctgaataggcaaagcgatttaattggctggtcttgcacgcaaattagttccaaagataagctctttgtaacacatttccagtcactaatgctcaaatgtagaacattcctttaaatggcaggataaaaaacccactatccaccatagtgcattttgggaagatgtctgtagcatatgttgctgtgaaattaggccttgtgggatatggctgtttgtcattttgatgtattttaaataaatatatatattttttaaagagccttttttaccagttcaaaaagtttaattaaccagcagtcaccgcatctgaatttttgtctctggggcatagatggcagaccaagattaaaagtggtaactcagctatacgagcatgggctaccttcctgggctctcctgcagtcctgtagacctgctgttccgcagaccatgggacacaaggtcagtgtgttcccagtgagggtcccaagtcagtcatcttaagtgtttgttctctgccccattcagtggactgttgacttcagtccctgcaagtgctttagcccgagtggggttttctcagagcactgccacgagttaagtgtgtgtttagccaaataatttctccgtaagggaaaaatgcagtcacccaaattttaccaacaatgacagagatgagagtagaaaagattaggcaacatctgagttttaacttgaaaagtgtccaagtcatcatgaaaggccgactgggagcaagtgattattagagattcttcaggagacctcatctgaaaatgttaagactgccagtgagggaaggaattgttaaaatgccagcggcttttttttcctctttttttctgtaattctgtaaaaatgcagagaaagttgagtggtacttcagaattgagggagagggttaccgcagcgtagaaatatatttctagatttcagttccacaccacaaatccacaacaatgccatttttcaactgtacaaaaatctgcttatgaactggacatgatcttaatggtagtgtcaaaggccaagtttttcacctgttaatatttttccacatttgtccttgaatctgaataactttatacagtactgtaaatttaacttacatcgagtttgttgtcaattcttatgaaaagagctttctgcatgtaacacatacggttaaagaacacagcaaaggacaaaatttgcaggaacagttttggaaccaacagaaaatgtcaccttttatttgccatcttatatatatctatcagttttaccagctacttctaaatttgtacattatttgtaagggaaagaaggaaaaccctaagacttgtctaacttagtggagaatgtgtgtgttgggcttaggatggatagctaagtcttattgagctgtgttacctaacttgtatataaaaattgtaattaaaagtttgggttcacctgtttctcacagtttaaaatgatgagtaattgcaaactctggaaatgtgactagtatatgatttaaggctgtagaagcaaggaagctctttcaagtgctaaaactaaagacttctagtttttggctcaaataagtactgtttgtataccaggatatgtgagatgtaaatgtagtaggtcacttttcacccttgtagctataaaataaaaattttgtagaacagaaatagcttgtactactgaattaacaaaagttatactaaagtatcatgtttaaaaaaaaatatatatatatatacagagttaagcttgttgctgttaccctgtctggatttgaaaagtgtgctgatttatatatatatattacacacacacacacacacacacacacacacacacacatacacctaaaatggcctaaagcagacatccatgtaattacagttgcaaaatgaaaacattttggaaagaacattgtatcatagttcattcatttgcagtggatctttgttcctttttactgtggtaattttagaaatgagtgtcaagtttgaaattagatctgctaagttggggttttgctgcttgaactctgcactgggtcctcaaataaaccgatgtgaatgtagttttttccccctgtgtgaagaagcagttacaccccaacaataggaggaaaaatctagaactatttcaagttttatctttttgtatatgaaaataaaataataataaaacaatcttgtctttcttaattacgtggcaggggattggagtttcctttcatgaggattagacatgaaatgaaatggcgttcggctgcttagagggctgactcaagtcagttcctgtttggtatgtgtaacattaacagatgttaatggctgaatgcctagtctgccatggtcctgtggggctggagctaagcacaggtctccatttctgccattcagaagtccagggtctagttggggacattatgaatggggaccattctcctgaacgaactgttctgggattttgagtaagtttctgcaggttagcatattttccaaatgtccaagacactccccattccctcatcctctgccaccagtcctgtactttgcagacaaccctgagcaatattgttgtaagtggagcagagaagccttgaaaatagttgtattcaggactattgcagatgacaaactctgtcattcccaaacgttgctgagtactggagtcatttgcggagctattaaaaaatacaattatgggtccttatccccaacctggaattagcaaaccaggtctccagtttcagagatttggacttaatctcactaaaggaactcatggttccccaataataaaataatgatagtctttaatacctaacaaaacaggaaggccccagaaatcacctcactgctttctgcagtaacaagtttttttggtcgatgactctttcttgcctaagtggagaaacaccctttaaattcaccctttattatgagaattaagcaacggtttgaaacttgtggagaaagtttttgatgaccctttattcagggaccagttgcccaatatttggctgtttttgctctttcacgtttagaaagttcaccttttattagtgagtgcctctaatgaaggaaggagagcaaagggctgacatttttgatacaggatcttggagctggaaaagctgaaaggttggaccttaggagtcatctggtcaaactttccctatagcaaaggaattctttgaccaaagaaatttgacacagaagttggtttataaaaccaggcttgtctgaatgagcaagtagaagagggccaagggaccatttcacttaccctcccatcccttcctttaagtctcaggtatccctatggaacacctaggaaccttgattaaagtttacaaatcactggcccaattccaattttacaggtgggcaaacaggcccagagggagttttcctaccctgaggcaggcaacccttccagttcttgacctcttgggaccaaaagtggggttacacttgttcagaagtagaggatctggattaggaaaagccatctaatatttatctctctagtatttagcacagtgtctggcacttacaagggccttaagaaatacagtacctcagtgattgtgtatttagtaaattctggggaaagctgctgaagtagccttgaagcctacagataccagtgttgtctggttgtatttgttaggattcttggttgcaggtgacagaagccattagacaaaaaagggggtttcactgaaaggattctgggggaaatgactagccaagacttcagaaaggcaggatgtatgtgggcttcaggagcctgtgggagttggggtcataacattgcaggcctccacctgtgtcctggtatttcttccattattgctcagagcaagaccagatgcatctgctcctttgacttcttagcaggaaacaaggctgtagacagtgccagagcttttttttttttttttagacagagtcttgctctattgcccagattggagtgcagtggcacgatctcagctcactgcaacctccgtctcctgggttcaagcaattctgcctcagcctttcgagtagctgggattacaggcacgcgccaccacacctggttgatttttgtattgttagtagagacggggtttcaccatgttggccaggctggtctcaaattcctgacctcaggtgatcctccagtcttggcctcccgaagtgctgggattgcaggcatgagccactgcgcctgtgagttttacgtcacagctttgctacccagagagactactagatcgaaaatccctaggaaggactctggttgatgtagcttaaccagtcagggtccttcagaagaggtattcctggcaagggggtagcctcccatttgaggctgtcaaaataatgtgcacacttcagtaggttgttagaagtggcctcctggtcagtgaatcatcagtgggatcagatgaaagttattcctaccagttatctaagaaataggaaacttgaagtttctgctaagaactaagtccacacggaatgctagagatcatgctgcaaaatgaagactcatttgtttgtgagtggtagtccatgaaatctatcctttctttgccagcaggcgttcagcaatctggattttatattctatcaagacaaagagtagagatgactcaaacatttctaacatttatagagcacttagtgacatgcccctggtacttccctaaacattttacatgtgtcatctcctttaatcctcacaagaacgctatggtctaagtattattattccaatttaaaagagaaggttggggacagtgacacacacctggacttacagcactttgggaggccgaggcgggaagattgcttgaggccagaagttggataccagcctgggcaacataaggagacccccttctttaccgctcccccactcccgccaaaaatttagccgggcaatgtggcacgtgcctgtagtcccagctactcaggaggctgaggcaggaggatcgcttgagcccacgagttcgagatcgcagtaagctatgatcattccactgtactgcagcctgggtaacagagaccctgtcgctaaataaataaatagacctgagttggaatatcggctctggagaccttagtgtaaccatgcgcaagtgtttactcacctattaaatgagactaaaggtattttcttctcatgactatatatagcataccactaagccctctagacatcatattccccatccatcgccccgtccagtggaccagggatgaagcggggatgcgctaggcatcccggtttgtcaccagggggcgtgcgaggccctcagcttggcgggcggtgaggcgtggggtgacggggggatggcgggggccggcatgcgcgcgcatgcgccgtggtaaaaggccggtacctcgggcaagatggctatcaagagtatcgcttcccgcctccggggttcccgtcgttttctgagcggcttcgtggctggggctgtagtgggcgctgcgggagctgggctcgcggccctgcagttcttccggagtcagggcgctgagggagcgttgacagggaagcagccggatggtaagtctgtgggcccgtcctcccttcgctggcccagatttcgggctccgactcctacctggagtgtgaatggcagtccttgacggacagccttcaccgtttgctgggcccctagcctggcccttggtttctgacctttattctcccggctcggcctcccttccccacctcgcgtctcgccagcttccctcatgtccttccttcccccgggcatcttcgttttctgcacagaaccacccccgccgcccgactttcttccccccagttactcatcgcgatatctatgttttaatgtctgtgttctctactaagattgttagctccataagacttgagactatgtctgttttggtctccatcatctaaccagcacagtacctggtacataattggcattcagtaagtatgaatgaaggaataaattaatacataattttagtagattagttaactgcccttctttcgtcattgttcagttgaagaatacctgctatccctccaaagtgtataaaaactcatgttgcaatgggtaccttatatttgacaaaaaaaaaaaaaaaattaacacgagctcatttcttgtactttgcggatgtgctaatttaacttgctcctttggatacttggcatctagcaagagaactacccccttggggggttgaggatttgagaaggcatcggggaggattatctcgaaactgactcactgctgaatgtgtgcttggtttctcccactaggaaaaacagtaccagttttactgtcatcttgcaacagcacacatatcagtgcttcagagatgatttggaaatttgatgtgaaagactaataagatcaagtctttattcaaaagttaatgcagtagctgcattttattcactgattataggcaaatcagtactttgcctactgtctgttttcttcatctcataagtaattgcaaaaatgagattttctggttgattagacttctgagccagtcctttgtaaatcacaccgctctccttttccttataatctttcattattaagagccactaattgtgtgtgtgtgttttttttgtctctgccccccctttttttttttttttcatttttaggatctgcagaaaaggctgtcttggaacaatttggattccctttaactggaacagaggcaaggtgttacactaatcacgctttgtcttatgatcaggcaaagcgggtgcctagatgggttcttgaacatatttccaaaagcaagataatgggtaggtggttggataaaaaaactgaagtaacagtatttatgaaagatgtctccaaatttaaaacagggatgattattaatattctcaacctttttcatatcatagcacatgtagaaaattatatttatataacttactggttaaatcaaccctgcctggcagccagaaagccagaccctttccagctgtctcagggctgaaaatacccatatcttgacacactagttgggaggctctgtcataaatattacagcaatgagcaccattcagttttaccttaacaaatatttatgtgcctgctatgtgtctggcactgtggtaacccttggggacctatgtgtgaccagagtagaggatctctaccccagtgacactttgagttgggagagtgggttgacccatcaaacaaataattttagatgtataattacaataatttttccaaaggaggtgattgcaagttagtgtagtataattaaggaacagtaaaaagtttgatgagaggctgggcgtggtggctcacacctgtaatcccagtactttgggaggctgaggcgtttgagctcaggagtttgagatgagcctggccaacatggcaaaaccgcgtttctacaaaaaatacaaaaattagctgggcgtggtggtgcacctctgtggttccagctacttgggggactgagatgggaggatctcttgagcccaggaggtgggggttgcagtgagccaagatcgcagcaccacactccagcttaggcaacagagggagaatgtgtctcaaaaaaaaaaaaaagtgtgatgagagattataacacaagaacctgattttgattagtaaggcttctctggaaaagtggactgaagagtgaacggaaattacttaggcaaggggttgaatgtgccatgggatatggagaagagcattctaggaagaaaggaacatttgcatcttcggaggcccccaatgtggacaggagttttgttcttttagggaactaaaagagtgccagtagatgaatgagggggaaggtgatgtgaaatgatgctggagaagtaagcaggtgtgtcagtttattcatgtgtccttatgtcttgatagggtcctgtagaattgccagatcttgataattaatgtcaaattggtttctaggtagattcttcaagtttacactcctagcatcattgtttcttctctctctcaaccttcacctatggtgagcattactgagctttaccaatttaatgctcattttacttgtgtttattgattatcaatgagggttaacatgctgtgaattagtcttttttggtaagttattctttacctatttcagttggggtattctcttttgaatttatttgtaaaagttcttttatttattaaggatattaccttttgtcacagttgttttgttcccttttgttatttgctttttaatttgctgtgtgttccacatattctcctttgctttaaaatgtgtgctatggctatgcatattaaaatgctgatattaaagttagtgtgtgccattctagagtgcacagcaaccagcagaataacaggaggcttggaatgtacttggtgttagacagaaactgatgtaagtgaaaactttatcaagcatataagaaaacctgggcattttatattgtataataagtcttgtgagctgtgtacttttgaggcaataaaatagagccaattaatattatttgaaaatagggagcaatgtacctgtgttttacttgattttaatgtaaaaggtcttctgttttcagtaatgatggactgagttattcagatagaatcttcctgctgaaacagaaaatgttagtatataaaaagtgtatatctgtattttttttacctttttttttgagatggatttttgctatgttgcctaggctggtcttgaatttctgggttcaagtgaccctcctgcctcagcctcctgagtagctgggattacaggtatgtgccactatgcccaactaaaagtatatcttttaaaaaatggcttaagaaaaatgaagagccagcagcatagtggcgaattgctaggttagtgttggtgggagaaagcgagaatccaaagaggtaagcgcagtcttggcaaaccaaaaccacatttgcctttgaattcacagcattatggggtgaggaggattgaaggaaagacctaagactcacccaaggtagattgtcctgtaggtcttgcagtgtaggagacccttcctgtgttaccctggaactccaaagggctacatcctcagggaagagtgaactagaactaacttccctgcccactcttagggactacatggaaggttgtcttggcactgaacggagaaaggtcaaaaggaagataaaaagtttgttccagagaaggtaaagtcaaaaactggctatcatgcagacttacagcccaaatctgtgcatcgagaggagatcagggaaccttaatccctgagcatggtttaatacggttctccactgggaatactgctagacaccttacagcagtaaatttatatcttttctcaaggaaggtatctttttaggtctttggaaattcctacaaattgcttttccagggcagtaagcaccagccaaagataactagctgtagaaggaagtgattccaatggtaatgacacttagaaatttactaatgataaatttttctgtattattctttataaagtgattctaaaaagctacatatatgatactttactgtaaactttgggatctgatactaaatttttcttggctgaatgaaatcaccttggaatcagtgacttcattgttctccattttacacttctttgaataacagtctgagtatgtttcatttgttgtcataacttttgtagtttaagaaagtctcacctcacgatagtgcaataggtagtgttaggatttgctaatgttctctgtgacaaaccattctggaggtgtcagaaaataaataaaatctgagatttcttctctcctatgtggtacccagatattctgttttagaaatttctgggtggagctcataacttaaatgtttattttgtcatggttcgagaggcagtaagcaagatatcagagacactcctctccccaaggctgtgcttgcctagaacaaattgttttgtgtctatatatatccattatttcagtacacataaacttgtcaaatacaatcgtacaaaatacaatacatgggagtcttttttaaaaaacaagagtttatttagtagccaagctttttatatagtttagtgttttgattggtgattgtttttacttaaaatactattcagaggagtttttctttaactggaaaggccagagtcaaaattatatgagatagctacactgtatgaaaagcattctttcctagactagtactttctaaattcagatgaagtatctgaactatcccaggaacttgagacatgcatgcaatccctaatactagctgcttggagagacaccagccagtagcaaccagcttgccttgcttagagaatcttgagggacatttgtctactgataacatatccattttgtgtgtttttcttcaggtgatgcagacagaaagcattgtaaatttaagcctgatcccaatatccctccaaccttcagtgccttcaatgaagattatgttggaagtgggtggtcacgaggacacatggctccagcaggaaataacaaattttcaagtgtaggcatactttgggggagggatgggaatatggggctgatgttatgcatacaacaggaattagaggtttaaaaacctaggagccaaaccttaaaacttgagaatttccatactcttatttttcttcctgacaatatgtctcttctttcaatcacataccgagacatttttaaacaggttgaatgaggaaaactaagtgctatgtgaagggaactagaaagccactgggagctgaagctactcacttttatttatttatttttttgagacggagtctcactcactctgttgcccaggtcggagcacagtggcttgatctcggcgcactgcaacctctgcctcccaggttcaagcaattcctgtgcctcagcctcttgagtggctgggattacaggggtgcgtcaccatgctcagctaatttttgtttgtttgtttatttattttttgagatggagtctctctctgtcacccaggctggagtacaatggcacgatcttggctcactgtaacctccgcctcccgggttcaagtgattctcctgcctcagcctcccgagtagctgggattacaggttcccgccaccacacccaggtgttttgtatttttagtagagatggggtttcaccacgttggccaggctggtctcaaactcctgacctcaggtgatccacctgcctcggcctcccaaagtgctgggattacaggcgtgagccactgtgctcagccactcacttatttttaattagttaattagagacagagtctcgctttgatgcccaggctggagtacagtggtggaatcatagcttactgtagtcttgaactcctaggcttatacggtcctctttcctcagcttcccgactaactaggactatagtcatgtttcatcatgcctggctaatttattttaaaaaatttttttaatttgtagaaatttatagaaaaggtgaaaaaatagtacaacaaacattgatacatttactttacatatacatatgtaaattctgcaaccattgacaaagttgcagacatgttttatttctaaatggattgctcaggagtatgcatcatctaagaatgaggatgtttatatatatgagtatatataaatacaagtatcacaccaagaagtgtatactaatacatttttatatatttgtgcagtaatattatctaaaatacaatgtatagtcagctttcccacatggtcctaattatgacctttatagcttttttgattcagtattcaatcatgaatcacacattacatttagttatcatatttctttagtcttctttaatctagaatgatttccctgccaaaaagtgggaggagtgtctttcatgatattgacaattgttgcgtaaactattggtgattatgtcattaagatagtaattctcaaccttggacactcattataatcacctggagaagtttttgcagtcctgatgcccagacctgaacctcatacttacaaaactggaaactctcagggatgagacccaggcatcaatatcaatatttttaaagctccctagattattccaatgtgcacccaagattgagagcgactgcttgaagagaaggtacttgtagcattggcagttagtatagatcagtgaggaaattacagtgaggtagagccttgtatatttgggtgaaaaatgtgaagtgaatgaacacatagtggccagatattcagaagaacaaggacgttttctctgccacttttgaactagtatgtttgtactgtactaaaataacttttgtgaaaattgatctctattgagaaactctttgccagaggcttaaaaccagaatttgcccttaagctttgtgttggaaatatttagttcttagaattcacgttataggtttggattttataattgataagcctacctgactacttactttatagtcctcattttgaataattattataagagctttctgtcctggaataattatggctttcatttattgaaacaagtagtcaataattgcctagcactaatgtttaaataagaaagtgtttttctgtgtctttttaataaaatatcttttaaaggggaaagcatttcagtgcaagttactatgtttctttctttacagaaagccatggctgaaaccttttacctttctaacattgtgcctcaggattttgataataattctggatattggaacaggtgagggatgagagttttaaaaacatgattctatggaagataaatgaagtgacaggagaatgtactgatgtgcctattagctgtttctgtctttgtttttcaaaagctaagcctctgaaggtaagtatgttgggccagttttctttgctgtgttttgggagtacagccttctacagaagatcagacttcaaaacgtagcctgcctttttgatcatgtttgccactgttcaaaagtcaagttttgaaagaaatgactcaaaataataatcttaataattgaggcagcatcttttttgagtgtgttcagtgaacactattattttctcttgtattccaatatttcttagctttttttaaaaaaacagttttgtatttcaagagctcctgagctttaggccagggtcagtggttcatgtctatagtctcagcacctggagaggccgaggcaggagaattgcttgaggccagcagtttgagactggcctgggacatagtgaagccttgtctctactaaaaatttaaaaaattaaccaagtgtggtggtccatgcctgtatcccagctactcaggaggctgaggtgggagaatcacttgagcccaggagtttgaggctatagtgagcggtgattgtgccactgcactccagtctggacaacagagcaagaccctatctcaaaaaaaaaagttcctgaacttaaaaaaagttggggtatagtttaatgtaactattaaccagtttttttgtttgttttttgtttttttgagacaaagtctcacactgtcgcccgggctggtgtgcagtggcacaatctcggctcactacaacctccgcctcccgggttcaagcgattctcctgcctcagcctcccgagtagctgggattataggcacacgccaccacacccggctaatttttgtatttttagtagacatggggtttcactatgttggccaggctagtcttgaactcctgacctcgtgatttgcccaccttggcctcccaaagtgctgggattacagacatgagccaccacgcacggccactattaaccagtttttgatagaacctaactataaaataatctgggccttctacatttttctgacactgtcaggtggcttctttatgcatctaaaactaacggtttgaggttctttcaggctattgtgtttttccccatatagtactttgtggtttaaaataatgaagagagcaccctgcaccaatgagagacttcagcagttatcagtcatggcgacatttgtttcatctacataccctcactttgccccactcagattatttttagcagattgcagatattttatccataaatgtttcgttacatatatttagaagataaggattcttttaaaatataaccacagtattattaatgcccttaaagaatttaacaataattctttattaccaattttatagtcagtgttcaaattttcctggttgtctttaattttttgttgttgttggttggtttgaaccaggattcaaataagatagacacaaaaatttggttgatatgtctctttagttcctataaatctgtagattttcctttctttttttttttcctccattcagattatctgttgaagatctaggatgtttgtcctagagtttcctttccatattctggatttgctgatcgcatacctgtggaagcatttaacattttcttttcccaagagataaatttctgggaggaaaactttaccttgtaattggacatatatatacaccctattaaaaataatttaaaaaaatttttaaggccagtcaagtgaagcagtgggagtagagaaggaacaaagaagtatgtaactggttgtgaacaattagttgtaaacaccactgcacttataccagcctataaaaataattggattttactttttagataagaaactgaggaatgaggacatgcattgttatctctcatttagaaatctcttccaactgggccgggtgcagtggctcatgcctgtaatgccagcactttgggaagccgaggtgggcagatcgcttgaggtcaggagttggagaccagtctgggcaacgtggcaaaactgtctattttagtagacactaaaaataaaaaaaaaattagccgagtgtggtggcacacacctaaaatcccagctactcgggaggctgaggcaggagaatcgcttaaacccaggagatggaggttgcagtgagctgagcctgggtgacagagtgagtgagactccgtctcaaaagaaaaaaaaaaaaaacttccaactgcagtcatatacatactttcatatgtatatgaaagtacatattacaactacttgccatttgggcacctgtaatcccagctactcgggaggttgaggcaggagaatcacttgaacccgggaggcagaggttgcagtgagctgagattgcaccattgcactgcagcctgggtgacagagtgagactccatctaaaaaaaagaaaaaaaaaatacttgccatttttatctggtaagttgacaaaaacagattttaaatgataaatcccagcattataaagattgttgtgaaactgctgtgttgtattttaattttttagagtaaattgatataaccctattaaaagcttatagagtaaattgatataaccctattaaaaatgttagttttacatatgatgacgagtctttaaaataaattcattcagtaattctggtccttgaaatttatcctaaggaattgatacaacgttgcattatataagaaatgttaacataagcccaattgtcctgcaagaggaatggttaaataaagtatatcatcttgttggaatgatacataattcttgaaagctggttgggaactatggcataaaaaaagttttaagttcatgaaatttgaattccagaatgtactctgagcgcacataaagaaaaatgtagatagttttgttagtgtatgtgatttttaagttttttctgtgcagtaagcaaactgggaaaataattgtttatatgcttataatgttttgtgccatgttcttgtttaatttctcaaatgcagtttttcttggtatctttcataggaattgatatgatttgctgctgtcttacatgtatatatgtgagaatatcatacatttttttatttgtttttcagaatagaaatgtactgtcgagagctgacagaaaggtttgaagatgtttgggtggtatctgggcctttgaccttacctcagactagaggcgatggaaagaaaatagttagttaccaggtaaggatgtttaatagtcaggtttatgttatctgtatgagattataatctcactttccattctgctttttatttttatttttatcattcaaaaaaaattttgcattctactttttaatttcacttattcaacaatatttattgaacacctattaggaatgataggcatagggaatatagtgatggataaaagcaactattgacttcaaggaactcacggtttagagtggaaaacagatgttaacaattaattacattaaagtgtgacatgctgtaatagaggtaaacacacacagtgtggtcttgtgaaaggactgatgggctctactcatatgagtcaggaacgcttaaaagaggaagtgatattgagctataccttgacagataagagtcaggagtggaccctgaggattccagaggatggagcaggatgagcacaggacatttgtggtcaacatcagggttttgagatttatatatcattcataaaaattggagcttatggtacaaaacagtgtgggtggctcaaggggtatgaagagttccataacaacaggtggacgggtgagataatatgcgactttctattctatgatgaagacttgggttttaatttttaggcactaagaagtcatagatttgttttaagcgtgggagaaatatgatatttgggttttataaagagtattttggcagcagcgtgtaaagagataggtgggaaaagggagcatttgaagaagagattagaggcaaggagatgagttaggacatacaagcagttggagtgaggaataatagaggaacacaggaaagagtaaccatgaataaataacttgtttgagtgaggaagagggagaagttccaggataacaactagattgcagaccaggctcagtggctcatgcctgtaatcccagcactttgggaggccgaggcaggcgatcacgaggtcaggagttcgagaccagcctggccaatatggtgaaaccccgtctctgctaaaaatacaaaaattatctgggtgtggtggcgtgtgcctgtagtcccagctacttgggagtctgaggcagaagaatcgcttgaacccaggaggcggaggttgcactgagccgagatcgcaccactgcactccagcctgggcgacagagcaagactccacctcgaaaaaaataaaaataaaaataaaataaaaacaaccagattacagtgttacagtgagttgaataaatgggaagaaaagcttttcttctagaagcttcttttttttaatatgcaagatatgtgagcacttttatagactgaaagagagattaaagataggagagtgtaattagtggtgtgagagcttcagacatctaatgttgctgggaaattcttagctagcctttcatattggcaatttacaaagtggtatacctgaagagcaggtgttcttagaaaaagtttaacatttaatcttatcatgcagaaatatcctgaggattcttccaagagggtggctgaaatgttatactatactgtgaggcttacagagggcagggaacaggtggagtgaagcagaagaggtggtagagtgagtaaaaagaagcactgaaggacttgctaataaggccaaagaggaggggagggaacacctagctcagctctggaaataaagtagatatttaataaatgctggttaggtaaatgattacttaagtctgtgataaaatttaataacctgaggaacagattgaggaaccaccccccccccaaaaaaaaaccaaaacttttagagtatattctgtccatttgacttgcttattatcagcctgtctagatcagatgtgcagtaatgtccaagcatccaaggatttgtataggtccatatgaatagcccactttctctttttccacacaaaattatgacccaactacttctttttgttaagtggaaatgatagagtagttgttttcaaggatttgtacatccttggaaaattccagtagatatgggagtgaaggaagtcaaaggaattagtattttaaaattaattcatttaatatctctcctcccatattaatttctctcctctgattaacttgctaatttaattttagtatattttatagtcttaggagaaaaaaaggcttaaagccccctgtattatttttcaaatattaattattcttggtctttgttaaatcctgtttattttatgtcagaaaagaggctcttctagctttgacttgtatatcttaaatggttaaattacagttttatttgtgctttgtttttataaaattgaaaaatttatatcactagcctactgtgtagtagaacaaaaatttgtacaatgtttaaaacgaaaaattaaccaataattacaagcatttcactacatagatttttgtgtggctatttctgtaaaatatgtgttgcccaaatgccgtagtggaaaatgtattgtttttcttaagttggatataatttttaaaaatagaactgataaaaatatatcttctagttgtttctgctgaaaaggcccagaagaattggtatgtcattagcaatgaacacatcttgagacccagatatttgtttctaaaaagcatctcctgaaaagactcagcgcttagagaaatgactgatttaaggggtggtacagggagagtacaaaatggaacatcatatatcagaaagccaaggaagtgctcagacaaatggtggggatatgtcagaaggacatgtgaatcagcttgaaggagctcccacttactgtatctggtgctattgaatatcaaaataaaatggattataaacctattgaattaaataagaatacatactcaataaatatgtaaatacatagggtgtaaagaaaagcttctgcataccatagaatgtcagttaataaatttgcgagaatgaaagagttatacaaatcattttgcacacatcaccataattgattcaggcaagagtcatcactagctaaaactagtgagtgaatgttttatgaggaatagggtatttacataatctaaaagtatctcctcatacattatttattaatcacaaagtaagaaataactttacagtgaagaaacatcccattacccaagtgatcaagtnnnnnnnnnnnnnnnnnnnnatcccattacccaagtgatcaagtttagtattgctagtaatgggacttagtgaaacgctgtactcctggtgtgatgcactgagcaggataaaatatcaggcataccccaattgagagacattctgtgaaacagctgacttctactttacaaaagtgttagtgtcataaaagacaaaggctgagaaactatctgttccagattaatagattaaagagtcatgcaaacaaaatgtgtagtatgatcttagattagatcctagaccagaaaaaagttgctaaaaaggatgttattgggagaattggcaacattcgaggtctgttatctaatatacaaattagataattgtgtattttcagtattaaatttcctgatttttaaaattgttctgtgatatgtaagtaaatatctttgctcttaggaagtcatatcctgaagtgtttaggagtaaaatggtgtgcctgtgacttttaaaaagtttagggaaaagagaagagagtgataaagcaaatagaacaaaatgttaacaattggtaaatctgagtgaaggatataaaggaaggagttctttgtgctgttcttacaaatgctaagcttttaattaattcagaattttaaaattatatattaaatattatatagatatttaaataaaatattaaaagatatattaaaatagttatcagtgaaatgatactcaaacatgttcaagctagccttaaagagtttcaaaagagacctatcagctctcctcaccctagttagtgtcataatgatcagtcatgtgaggtcagtcaagatcagcttcctgaagagtatactttgagtaatagtcttgtttcttgtttttattttaaagacttgctggtcttaggtattctctttcagattctgggcttctaaggtcatatcattagttttccatgtctcttattaatttataggacctatgcatgttcacactggcaaatctttaattcagtaagtcatccgttcagcaaattttcaagtacctgtcatgtgggaggaaggtatacagaattgtaaatggcatgctccaaacttatattcttgattactttcttcctctcctgtatttcacatcctggcagtcatctctcactcttaattactttgaaccaacaacttttattaattctctttttttaaaataacttttacttagacataccgaagctctgaacacctgcagtattgcagaggcctctaatgggtttctctgcctccaattgcgttggctaccagtctatctggagtacagaaaccatgacagagaaagtatacgttgttactttcctaatcctcggaaccataaaaaaaggaataacattaaaagaacagaaaaggaaacttcatttatactgaaattagggaatgttcacagtcctgtatcaaggaatttttcaaataatatctgcaagataaagtgaaatttggaccaaattataaaggatgttaatttgacatgtctcctcttatcaaagcatgggacagggtactagaattagtaaggaagttcagacctaccggtagtagaccacaggagaaatttctggtgtttaacttggagcttatccctttatcttgcaatagtaggaaaggcagggtggttatagttgttaaaagcacatatttcatgtcagatctggccttggatctttgctttgatacttacttgcatgtggtcctgggaaaatgacctaacttctttaaagttcagttttatctgtgatatttggatagtagtagtgtttacctcaccgagttgctagtatcatcgttagcttggtagttagcacataggaaatgttcagtaaatattagctactattactcctttggaggctaacataagaatgaagaccagtgttttttgtattctttggtgcatgtactcataaacctatgatttctaagattcttttttacttctcctttcttatctacagaagcccaaaagtcaggtgcctctttattaattttaaagcacaatttttgtagtcttctaagtcgatgcttttgagttcatgagttcatgttatgttaggagttgtgaaattagatacttacattaaacacggtttagtcttgatgcttttttttcgctcatggcattaaagtcataactggcaaactatctttccttgaaattaaacttgaaaaatttttaaattatgcaattatatgtgcataatgataaaaatgctaaatcttaaaacatgattgtggaaatatatgacattgtaatgaaattcaaacagtacaaagcagcatgaaaaggtaaagtctcacttatactccttatcccactgtccagtttttatttgttttggcacttatttctatatctcagaataatgagcactaaaatatatttttaacttgtgacctgtcgcttattaacagttactttatctctataaaattatgaaatttattgtttatttcttgcactgcactatactctgctagtcatatatacttaattttagttcttccgttggtaaactttgcatcatatactttacataatatacttgaacctctaatcttgatctaccatttatacttgtcaaggtttgtagcatttacatttatgtttgctaacgataatgtagtctgagttttgcctgtagcagagtttgtaaactgaggcctcttatggcaagtccagcccatagaggtattttatttggctcacatggtatatatatatatatttttaagtttttcatagagatagggtcttgctctgtctgctaggctggagtgcagtgacaagatcgtagctcactgtaacctttatcttctgggctttcgagatcttcccacttcagcctaccaagtagctacgactacaggcatgcaccaccatgcccagctaatttttaagtttcttttttgtagaggtgggggtctcactatgttgccccagctggccttaaattcctggcctcaagtagtcctcccacctccacccctcaaagggctggaattaaaggcgtgagccaccacacctgactgtatgttattttttaattagtttataatgtttaataattgggagatttcacataaatccagattttagcttctcttaaatcagatgactccgtaacaattggcatatactcccataggcagccagtttactagacaagagtatcaaccttctccttagattgaacacacatcttcaaatcactgtagtctttacctgccccattttactcacttacatttcctgtctagcccttgttggtctttgagtttgtaatccaagatctattagaaaatatttaaccagcatttatattattataagtgtgtatgtagtatgtttggacctataaggaaatagatataattctatatcattaaatctgtgccacttgagagagaaatattaccacaaacaacggaaaaacagaagtggaaggtaagggtggcagtgtattataattgctctttttaaaaatactttctaattcagataatttaggtcatttaagcatattatcatatgattttttaaaaaggtaaattagttttttcgtgaaaatatattcttggagccctctgactttctgttttaatttggattacttgtttcctccctccttccctttctccttcattccctttcttctttccttccttttattcaacagagacttaactaagcttttactaggtacctggtgctgttctgggtgcttctgatacagcattaaacaaggcagaaaagagtaccctcatggagcatgcattatagtggaggagatacctagtaagtaaaatgcctcgtagaaatataaagcacggtagaggattgtattagggtgggaaagaaagacaaggggaagtgagatagggcagaagcctaagtgaagtgagggagcaagccatatgaacagtttttcggctagagcgagtgcaagacacgggtgaaactgaggttggcacattcaaggagcagtgctctgctcagtgtgactagagcagcgtaagcatgaggaggagaagaaggtaaattatagagggaggcaatggcaggaaatgtggattgtattaagtgagatgggacacttaaacagtgttttgatcaggttagtagcataatctggtttacatttttaaagcacacactggcttcttgtgaagaacagaagaaagtgtggaacctggaaggccagttaagagactaatggaattgtctacatgagaaataataacttgaataggatggtggtggtagaaatggtgagaagtggtatgatttaagatgtgcttggaagtggtcagcacactgatgatgttgaaagctatgatgagattatataagtgaatatagacaggagagaacaatcaattgaattctgaaccctggagcacttggacattagcggtcaggaagaagaagatccagcgaaagagtcagaggagcagcctttaaggtaggagaaatctaggggagagtgatgttccagaagctaagtgaagaaatcatttaaaggagggaatgatgagttgagaactgactgtttgcaatcccagtaagcttttttagttttaagtcatctatatatctgtccttctgtttctccttattatactcctagcttgggtccttaaattcctctttccccttaaatattatcttaaatccctcttttccaccctcccccccctccccctgcttttttttttgagacggagttttacggtgtcccccaggctggagtgcagtggtgcgatcttggctcaccgcagcctccacctcccaggttcaagcaattcttctgcctcagcctcctgaatagctggtattacaggcacctgccaccacatttggctaattttttatatttttagtagagacagggtttcaccatgttggccaggctggtcttgaactcctgactgcaagtgatccgcctgccttagcctcccaaagtgctgggattacaggcatgagtcactgcacctggctacccttttttatagataacttttttttgctttggtagagtatatcctcaaattttttctggaagagtcaatggatgataacctttccgagtccttgcatgtctgaaaatgtcctaaaactctgaagatgcgctcaggaatctttatgtatgacaagttctctagagtagttttatgtataccaccattttattttattttaatgaggatgatccctttatttgacttgaggatggagaagaagaggattatgaggtcacgggaatgtctcatgaggaattacccaaagctggtaacaccaggtgctctgccaggaggactctctggaaggggcagccagctcacagatgccctggatccctcgaggccagtcactaaaaagttatgaccatccccttcttgccagtctgccagggctccaggggggaaaagtggaaaattatctggtcctggcccagggccagctcctcggtgaggaactcgaagaagtgggtgctgtggctgcggttctcctcagtggtgtccatcatgctggtggaggagatgaacagctgcgcccagggctcagtggacctactcagcaccatggtcaggcccgctacacccatcatgttcacatgctgcccttgttctgtgctccctggcccatgctcccatccttgggtttgcccaggatggaggctgtggcgcagagccatttctccaaccctgcaggcacttggttggcaggcaagttcgtgtctagctctaggaagggcatgggctgtagaaaaagagacccattcttttagagagtatttttctagcctcatatgaaggcaaaacaaaggcctgctacttttgtgagttgtaggataattctgcagatgaatttttttcagtcacacactttgattttgataccctttatttgctagagtactacttaaggggtggtaaaaatattaatatcagctttggctttttcctgtatattttatcttaacaatgtcatcacatccatctttcatcttccagaagttcacggtagttcttagtccagtaatgcagtactctgtcatttttcagcacttttatacctttttactgccattccatatatttatgtggaatatatatatggatatccatatatatatatatgtattttccttttaatttgcagaggagaggaccaaaaacccgtgttcaatttgccttttttaactggaaaccctactttaatctatatttattagtgttttgcaaagcaggttaatttgtttttgtctttgcttttagcaggttaatatttcttaatgttttatttggaaataatttcaaatttatagaaaggttataagaacaataaaaagaactcccctgtatctttcacctagatttactggttgttaacattttgccacatttatgctcccccatatagataggcatacacctgtttttgttttctgaaccatttgagttagttgcagatatcttgttcctttcctcctaagcattctgtcatgtaaccacagaataattatcaaattcgtgaaaaaacatatagaaatactacctaatatttagtccatattgaaattttacaaattacccaatactatcctttatactgttttttttttctgattcagtatccaaccaggattgagcattgcatttagttgtcatgtctctgtagtctcctttaatctgaactagcttctgactcagccttttgtcttgaatgactttgatatttttgaatagtacgggccagttgttttacagtatgtccctcctttgggtttgtctgttgtttgctcatgattcattatgtttttggcagaatgtaggagcagtgatcttgtgtccttctcagtgcattgcatcaggaggtgcataatatcagtttgtctgattattgatgattttaactttacttggttaaggtggtgtctaccaggttttttcaccatttccccctttggaatttataagtaatctgtggaaatactttgaggcgatgtaagcatctttttcgtcttcgaactttcactcaatagttttagcatccattgatatttcctgcctgaattagttattactatgttagttgctaaatgatgactttctaattcttactccttaatttattagttgacattccactgttagagcttttccttgttatcaatgtagactcacagatttatttttattcaaagagttttaatgtttactgtgattgttcattttgatgctcaaattgccccagatttagccagtgggagctccttccagtgtctcctgtgtccttttgatgcatcctcatcattttttagcatttcctactttctggtataaggctatgttccatgttcatcttggccatcggccatttctccaaggagcactggatccttttagtggggattgatgtttagaaaccaagatctggacagcaattcagattgattcttgagtgcttgctctgctgtttggtttgtcaggtgtgttcaccacatttatttttagccttttgtagtggatggagagagccccaaagctcgtagtatatggattccattgcctttagtggctcactgttgagaaggcctttctcctctgctttctgtgttcttgtatttcaaaacagggattgacagacactggtcattaggaaagcagttcactgtgtttgtacattgtgtatgtatatgtaaagttgaatattgacttcacgaatccatatttctggaggagcatatggtttttcagttttctcagaagcatatcaaactgacatctacttttatatatttatgtttttcactaacaaatatctccataataatactgcttttattagttttggcattatatttcaagtcaaactttatttcaggtagaattttaaacctaaaaatctttggtgtatctgttagatgaaagcaaaatatagtttgttagtaaaataaatttgaaaaattatcttgaaattcttgccaagaatttaattgggcccaaatttttatatatatgcacacacacatgtatctataaacttgggagaatttggttaagaaatagagatgtgggaggtctacctaggcaaggtgaagagatgagaagcgataggatatatgctgagaaaacagttaagttagagcgttcatgtagggaaggagacaaaaataaaaggaaagtttggggcctggtggcagaaacttcaaatgaccagctaaaaagtttaggcaagaacttcaagataattttctagcaagcagggcctttgaaaagtaggcaattaattataaaacaaatatagataaaatgatgtcctttaattattctgggaaaggggacacagcattgcccagtgctggagactggtctgtttctctcaagcaacgaataatttgaatcatgaattcccactttcaaggcaatgtcttgcaattacgtacggcaattcagagtgcttggaaagtgttttgttttctcagatctagccatttaatatttactgcttgcttacaactatactctgaaccttattttaggaagttgtacccaataaaagggtttatttagttttctgtccaggcaatgaagcatatatgtgtttttactttgggggaagtaaagcaaatgaactggcatttcttgagggccaggtataccaggcagtatgtaagtagctttatatatgcatctcattcaatcttcactacacccttacaaaaaaagtagtgaccattttcttttatagacaagaaaatcaaggctttaaggatcgagtctcaggcatatagcttataattgtcaaagagggtatccaaacatgggtctgtctgacaattgccagtcattcacagtgttactctttgaagcgctcaagtttatagtaaatgaattgctgtgctgttcatatacaaaagcttaaggttagcagataataaaagatggtgtggatggagagaggagttacaagtgatacttgctagcatgcaaaaataacagaaaatgggccaagaggaggattccttatagccaggcagaaatgtctgttagaatatgtaggaaaggatcacatcatcatagaacttgagtgaatatgagcctaagggaagattcgtagcagtgattttatcagaagtgagtcatctgacagttctaatcagaatcaccccctttattatatagctgaggtcatccctgtgctttctctgatgttcctgtttcaagaagaggttgattccagacaagtgaaacatacctgaagattctggtttggacattataaatggtctgacaagaaagtgagcttcagattttagaactcagtgatggtggtaatgttagaaatatttaacaatctgtgttcttttataacagcactttgcaaacttccattatactaaccctaaaggggaggaaattgaaaatgccctcaggagtcttgagacatcatttgaagtgatatgggagtaatatttttttttaagtctcttgctttatatttagggaaagcttttgttcatttccatatctatttgttttaatgaaagttaaattattttactggttgtctccctaccctcaccctaaattttcaagtaccattgacagcctagaaagagggtgcttgttttactgtgacttagtaggctgctaccctttggcctggaacaggtaccccagtgtgagaagtaccgtcttccagggtttgtgctgccacaaaagcatctgctgaggctctatagataacacagggggcgaccacattcttgttgactttaccacactttgtgactccctcacttttcatgttccttccccccctcaggttcggatttcctgtttatcaaactcccatggtttctttctttcacttgatcggcatgactttttaagggcgtggtctcttgatctgtccctctagttttatttttggagtttctttttttgtcttaccaggggaatgtaaccaaatatatctatctaattctagcaggtacatattttttcctcttgatgctgcttaatattttattggaggcacatttacagtatgtatgaccttacaaatggcaggcttaatatgggtattgtttgttttgggtctcttctgggtctgggtggcacaggtggtggtggcaaattgtcatttctgtctcttggatggaaggaaacaagctcaggccagtatataagaaaactagcttcaggttgcgaatgagtgccagcttatgtattgtattttctagttaactcccagttgacttccaatttttgctacagtcttgagtagagttcagtgcttcttgggaatttaatagcagcaagggtttcctttgcaaaatatttttatacctaaatcttacatgaaaagggttgtttgctgactcactgattaactagacttggtttatgttaagcctttgagtcctttgttacagacatcatttgtgcccaagttgctttctcctcctgaaaccccattgctgacctgtaactagtctaatcttgcttgattatacgtttcccccgcccccatccctctgtaaaaccatcttttgtaccaaatgccgttgtatcttttgaatgatgtccactacaaaatagctttttacatagatcttgtagattttgaaaaatttttaactaacatgtcattgtatcttcataacaattctatgagagaggcatttataaaatacaaaatagcaatccacccatggggatggctgttacgtattttgtaaatgaagaaacaagaaatgggtggacgcgacttgcagcttagtggcaaagccaggtttgaccaggtctctgggcttccagtccaccaaacctctagtagtgtttagaaacatttctggaagtctcccaatttttccaaaagtaggaaaaatttattatgtagattgagttgtctttaaagagacagctctaaaatattttacgattgatgttgttttaaaaaattgtcttaaattcaaggaagaaacggtgtgtttttctgaatatccaactaggacctgtccctatattagacagattaaagatgtttgcttcctaagaacaaagcagactgaatcagaaaagagattagtgagtggctaagtttttatttttctccttagttctagggatagtattttacccccttgaaatagtgtgagaaggtcatgggtagaaggatcacacctgtgattcctaataggaatttctgtttccatgaggtttctcaaaagtagaatcgaggtcctttagcaattgtaagagtttttaaacacctatagaaatggtacatttgcataaagtaaagctgtagaactgaaaatgtccaacgtctttacttttggctggaattttacgagcctgattagctctgcatggcagcaatgggcatgttaattatatttgaaaattgccgtttgtttgtagacaaggagtccatgaggagagaaaatcaagtgaatgttcttgaactgtactgcagtgatggggaatgtccacaaggtggcgcaaagactttgtttaactgctggattcctagctagcacctggaatacttgaagcccctttcaccttctccctctttgcaaactatggctcagctgcatctgtgccctcagttctggtccccagcttcccctgaatccccttcgtgctgttatttgggctttgtattggtacctaaccacattctacctgtagtgaaagctgaaggtcttggttcccactctaggtggtaagtttcttgagtggaggcaccagctgcatatactttaaagcatattcttttctgtatttccagcaatgccaggcacaggacctctgagttgcattgttgaattaacatcttttggttatttgtgagttaattgtggacttccatagggttctccctcagtatatttttggctttgaagagtatgtttatcttcccagctgcataaatgaatttttggggtgaaatggggattttatgtttgtagtacatagtttcatagactttacaccacaccccgaccaaccactttcagtaacttcgaagacagttggttatggaaatcattcccgtgcacgggtcttccctgaagctctgcaattggtcttggcagtgggaccttcatgtgtgacagacagcagatggccatggagttcccaggctgtgtgccatgtaggtaggagcttgaaaaaagcagaaaagaaacctcctttgtagctgtcgtgtctctgtcttatttgggctcacaagaaggaatcttgctgcaggcagagctgtctgatcaggaaagaaaactgactcttaccagggaagggcccgggaggggcagtaataccaatgagcatgttttagttggattatgtcagttattggggaccattaagtaaatagatgttgagtattttctttttcaaaaaagcctttttgttttgttttgttttgttttgagatggagtttcgctcttgttgcccaggctggagtgtagtgtcacaatctcggctaactgcaacctccacctcccgggttcaagtgattcttttgcctcagcctcccgagtagcagggattacaggcatgcgccaccacgcccagctaattttgtatttttagtagagatggggtttctccatgttggtcaggctggtctcaaactcccaacctcaggagatctgcctgccttggcctcccaaagtgctgggattacaggcatgagccaccacacctggcccagatgccaattggaaggaaatttgaaaaggtttagtaataatgttatttcattaatttcagccaaaccacacaactaatttatgttttctaggcctgaccctggctctggcttcttcattgtgtggatacctttccaaaatgtttgatatgacaacatatttagaagttctttgatcacaagcccaaggatgtgcaaaactcagagcaaacagcatttacatttatgtaatttaattttaaaaattagccctaattgaagtgatcctggagatggtaatgttgacttgacacctggctgcttctctaagggctatctgtttagttccctagtgaatttcataaactaaggccatgtttttatttctagagctgggagtacccaagcctgcagttttgacctttgaatgtttggagcaccagaagttctgattatgagatgaagagaaaatgacagcttttcttgtctattaaaaaaccaggactcactcatggcattcctttgtcctttgtcctacaaacagaacagagactgtgacccctgatctttgggttggcattattttatttttattttttgaggtggagtcttgctctgtcggccaggctggagtgcagtggtgcaatctcggctcactgcaccctctgcctcctgggttcaagcaattcttctgcttcagcctcccaagtagctgggattacaggcgcctgccaccacacccagctaatttttgtatttttttttagtagagatggggtttcaccatgttggccaggctggtcttgaactcctgacctcaagtgatctgcccgccttggcgtcccaaagtgctgggattacaggtatgagccaccgtgcctcacctggggttatattattttaaagaatgtgatcagaattgacctgttaaatactcttcttgtatgtgaatctctgagtcagtttattatttttggcagttgaatttaaattcattagaacagagtgggatggcttataagtacatttcagcaatgcattaaataagtatttttcagaaaaaatttgcgaactgttagcacaaattggcatcactaatatggctgctttgtttttaggtgattggcgaggacaacgtggcagtcccctcacacctttataaggtaatcctggcccgcagaagctcagtatctaccgaaccactggcgctaggggcctttgtggtacccaatgaagccatcggcttccagccccagttaactgaattccaagtgagcctccaggacctagagaagttgtcaggactggtgttttttcctcatttggatagaactagtgatatccggaatatctgctctgtggacacctgtaagctcctggatttccaggagttcaccttgtacttgagtacaagaaagattgaaggagcccgatcagtgctcagactggaaaagatcatggaaaacttgaagaatgcagagattgaaccagatgattactttatgagtcgctatgagaagaagctagaagaactcaaagctaaggagcagtcaggaacccagataagaaagccatcctagtttttatctcaagatgtgtcataccgtctgtaatgaagcaggcatgccctctttaggctaacatattttagtggctttgctttttgctttttaaaaagtttttctctttaagagatgtggtctcgccgtgtcatccaggctggagtgcagtggtggaatcatagctcactatagcctcaaacttctgggcttaagcaatcctcctgcctctgccccctgagcagctgggactacaggcacacaccatcaccctcagctactagtggctttgctttaaagaaacagtggaatcctaaatttatgactaaaaattcccccaaaagatgaaagatctacaatgtttttgtcagtattatatttgactcaggaactaattattaagggagctttgacacctgcagatggagggctgatcttgtgtcaagttaacaggaagactgcccacagatgacactgcatttgtatccctgtggatgtagagtattgggaaggcatttgtttagtttcatgcctccaaaccatgcattgtctgtgatgtatctgcccagccttctcagaactcaatgttgtacatttttccctctaggacctgaattggtcttggaggcagcttttagaaatcctctgtgtagttcctgtccacatgcactatatatttgtttcttttttctcctctcatgaatctgctcgtttctctacttctgtctacgtagaagcactcagcaactagtttctgctcattaaatgtgttctatatactaggctcagtgctttacatgtgttgtctcacaatgactctctgaggtaaatacactatccccattttacctgtgagaaaattgaggcttagagagcttagtgtcttacccgagtttcacttttccaaagtagtcatccacaaagtatgaggcagacagatctaagagaagaaagacagctgaggtagattcaaatcttttctgacatggatggtggctttttactcagaaatatatacctatttccatgggtatttgtgggcctgaggcatgcttggcaagaagagtctggtttctcgtctgctatgcaagccaaagggactttaatgttctttgaattgaaccctccttagctctgtggaaagagacagtcaggaatatttgggaattagacggcaatactttgtggggtttattagagcccatgcttgcctccagagatacagttcttttagtgaccagatactgccaaattgatgtgttcttgctttccaggtgagctttttgttcttaagattaagaaacctatgaaggatctgcagccaggcatggtggctcaggcctataatctcagcactttgggaaatcgaggtgggtggatcgcttgagcccaggagtttgagaccagcctgggcaacataatgaaaccctatctttacaaaaaaatacaaaaattagctgggcgtggtggtgcacacctgtagtcccagctactcgggaggctgaaatgggaggattgcttgagcctggcaggtcaaggctgcgatgggacatggtcatgccactggacgccagcctgggccacagagggagaccctgtctcaaaaaaagaaaagaaaaaagaaaaaggtctgcccacaaaatcactagcttattatttgcttcctgtgtgcctgcttgtctacctagcatagtaggccaaaggtccaaaggcatttagcattcctaggggaaattgtggctgtttttctgagccagatctcttgatttgggtttacacggagtcctttcatggactatcctgagtattgtcagtaaaacgtcttggggcataagaacttgtctgaatctgtcatacataccactgctgtcttttccgagtggtattacaagaaagatttttgtggtgtgtttgttctaagagaaatgccaaggctttcagataaagataagatgataatgattgacattgttctgctcttttatttgggtaaaaaaggaaagttgaggggtcagaacacagtagcctgattagtaccattctgttttgtcacactgttccccattagcttgtaccagttctcctcttctcggggatgtagagccaaaatgtcactgtgaccaaacaatctgttcaattttttctcctcaatggagaggtgatggtgtggcctgggtgtttctccaggagtgtgagtgggcagctctgtgggataagtcctaggtacctactgcccatctctagaggcgggcccccaactcccttcccctgttgctctgttctgccgacctgcattgccagcagccttggagttacttatgctcttcttgctcgttcctctccacctagatggtagaatctcttatttttagatcaatgaagtttttttttttttttttttttccactggggcattcctgagtttatttggggcacacccgggtgagggccctgcccctagaagaaggtgttgggcctcttggtgaagtgtggcttgtgcggatagtgcagtacctagtggggcagcaggaagttgatcttggagtcatggaactgcttgacggctggccggcggcacttgctggctgtggtctcctccaccttcatgatctggacggagtgggcccgggcgtggtgccaggcgcccatgtcttggtagcactgggtgacagcacccgcggtggtcaggtccccatattcccggcacatgttgtgggtgctgctctgggcgtcacagtgcagccagatgccgaagttcttcacccgcagggggcacttctcaaacacctgcccacagtagcaatctctcctgaagacttcttcatcttctttaactgagataccaagtaccaaaagcaggacttggcgacgacatgattaggtgcaaagattcgcatgtggtagaggggtagtgtatggcatttgggggtgggcaggcagcgacccaccaccttgtactctcatagtgtgcctgaggccttcatggcgtcctgtctgccctcaccgccacctgcaaaaggacagatcaatgaagtttcttaggtttttatttcttttgaaagatgctgcctggtcattgtggaaaatggagataagagcttgtaatacaaagttgcagtctgccagtcctcatttttatttatatttatttatttatttatatgatttgcacatcagacaacctttgaaaaagtttgttagtgtgtaacagtggtgtttgaaatgtatcaacactttcttcaagagttcccccaaacaaacttgaaatgtaaataattggttagaggttagaattttcctcctgtcataccgcttcagccctcaatgtggctgttgatcatcctggactcagatgcagcataggctgagcgtgagattctgcccttctgttctctttaccctcagacagtccctggtctgagggaaaggcagccgtggaggaagtgccagtctggacaggctcttctgctggaaacccacatcccaagtttctctctaccttcagtgatatctttattgtgaaattccaaactgtggtccctgaattgaggctgttgcaccaatattgttgtgtgttgccatacaacaaattgcaaaggttaggagactggatgtcagcccttaattaaagacctgcaaatatttctgccccttgcaccttgaccttcaagcaatggaaaacttgtctttccttcagacctttgattagaactctaggctgagttctatacttggaatgactctgaatgttaccatgtcacctacctgtgtcccctggcctcatccttgtgagtacataagtgtcattgatatcacctctgtgaatcgcaaacttcccattagcagcccatccctgaacctaaccctgcacccagggtgctgtttgttccctgcccaccccttcataccttcactctgtgtgtccttccccgtcctggcacacttccaagtgccttctgtatcctcactatagttcattctgatggatttggtcagggctgggctcacatcaggtgtgaaactcctgctcctgcctgtctccatgcctagcctccatctgggatgctttcctggatgtcatccttcttggagattgtctatcggggatccagtgttcctttttccagtctagccccaccttcagggagcaaacctcaggtcattagggccaagcaagatggactgcattgacacaggccccatgcaattcaggacagtgggggtgccgatgggctttcctactcctgaacatgccaactgtggtcaaggggtggactgcccctgagtgtgccaagtacctctaggggtcactgtggcctagtgtcactgcaagacttagtttcagctgtggcaccaccccagtatggaacttgcagctctgtaagccacaaagaactcagtcagcctcagacatcaggcaccaggcactcaggctggatggaatagcagaggttatcttgtccagtgggtctcatgtttggctcacatcagaatagcctaacagcttaataatgttcccctaaactttgttttgagaaatttcaagcctacagaaaagttgaaagaagagtgcaatgattgcccctccccccaaattttgtctcgtttgctttctcttttttccaaattattaaaagcaatttgctgttttttttaaaaaaagtaaattataggcatgacacttcacctttctaatacttcagcttatattacctaagaataagaacattcttattttttaatataattttaaattttattataattttaaaatatcacatctaagaaaattaccagaatttgatatcatctaataaacaattcctattaaaattggcccaggtgttccaaaatgttgtttatgcaattttttccctaaatataggtttcactcaaagttcatgttgttataactagtctcaatctagaataatctgcctcaaaaaatagattctctaactcttcttgaggttttgattctgtagatttggtgtgacgttggaatcagtattctctttttttgagagagagtcttgctctgtcacccaggctggagtgcagtggcgcgatctcagcatactgccacctgtgccacccgggctcaagcgattctcctgtctcagcctcctgagtagctgggactacaggtgtgtgccaccacacctggctaatttatatatatttttagtagagatggagtttcaccatgttggctaggctggtcttgaactggcctcaagtgatccgcccaccttggcctcccaaagtgctgggattacaggcgtgagccaccacgccagcctggaatttatattttctaaacaagtaacactgatgattctgctgataaaccagggtttcaagccagactggccctctactatacctccaccctctcccaatacatatagccactagacaggagtcctttgtcagataagtggtctttgagcttccgaatatctctaagggagtatgttctcctatccctttgggcccccagctatgcaattttctttatagtagatcttcataagatgaagttgaaaccttcccttgtaattcctacccatcaatgacaggcccaaactgccattccaggccacacagaactggctggcacctcctttcacctgatagtccttttgagatatgcagcttataaagacatgtggcatctcatgtcacgctcaggtgctcatgaatttcaggcccttcaccatcatgattttttatgccttcatgatgtggcagccacatctgagcaaagcattcaggacgcagtgatagcagtgctgaactgagtccaggggattgaccgctcttctcagggacgctccacttttcacactatataccattgcttcctgtggaactcggtccaactaactgcctcaggtctttttcacatgatcgatctgctgtcaaatcactttcccgttatgcacttacagagccaatttttggagcacaaatgtgagattttatgtgtgcccaactgttaggatttcatcgtgttacagtttctacccatcttcaagtgagttcacattcttgatgatcccgatttggccatctgacatggttagctatgcatccgagctttgagatagcagattgaataaacaagccttcaatgcgtttgttaaaagcattgaacaagacagagccatggaagatccctctggtagaaaactcactttacatggcaacccacttcacatacccagcaagtttcgtgtgataatgtgctctgatgttttctattaagttcattcctgtttgtttgtttgtttgtttgtttacttatagagacagggtctcactttctcacccaggctggagtgcagtggtgcaattgcagttcactctaaccttgtactcctgggctcaagcaatcctcctgcctcagccttctgagtagctaggactacaggcatgtaccagcatgcctggctaattaaaaactttttttttctggagatgagttctcgccgtgttgcccaggctggtcttgaactcctggcctcaagcaatactctcactttggcctccctaagtgctgggattatgggcttgagccaagtcactgagcccatttctgtttctttagaaggaaaaacactgaattgattgcattatggagaaataagtctccatcacaatttgcctgtgagtcactctgggatagggagagtgcctgccgcatctctgggtctacatggcatgactgggccaatgtttggatgccagcagtgggcagggaggctgctggggaaacttggggtcccacataatcatctttccacttgtcagtgcgggacagttgaggacaactgacttcatccttctgaatcaggttcctcacctgcaagcaggttgagaaggacctgcaggattggttgaggattgaataagataacatgtgcagtttggtaagctcttaataaatggtagccagttactgtgaattcttgagaatgattattggtgtctgatgaaagtcatcctgatctgagagagtgaaggacagagccgggcctcggtatggtgttaacctgaggtggtggaagtggttcaatctcttctcaaatcctaagactgtgatgtgttgcaaccagccctttgagcatatccgtgctttacagtttgcagagcgctttccagttagagcttatgcagtccaccatttgaatcggcgcgattcatcccatttcacaaacgaagcaacaaactctaggaacttaccaagattttccagtttccaatctaatgtttaccctcaactcccccctcaaggttgttgcagttattttcatttgctttcttttttttaatatatatatatattttttattatactttaagttctagggtacatgtgcacaacgtggggtttgttacatatgtatacatgtgccatgttggtgtgctgcacccattaacttgtcatttacattaggtgtatctcctaatgctatccctcccccctccccccaccccacaacaggccctggggtgtgatgttccccttcctgtgtccaagtgttctcattgttcgattcccacctatgagtgagaacatgcggtgtttggtttttttgtccttgcgatagtttgctgagaatgatggtttccagcttcatccatgttgctttctaattcggtcattcatgcatttacccatttcagccctacagtgccctgctaactctttagaggcaggaggataatggagttgattcttttctgaggcccctgcagggttttgcaaatagtgagtgacactcaagagatgttttggagttatgcagcaagtcagaaacgtggagcttatcctgcttgagtcctaatgtgctcatttcacttgggcagggggcgcagggacacagaagggtggagacctgggtcctgctatgtggctgtgatcaagcctgggtcttgaataacacccgggtactgagcattgctgaactcatgcctgaactcccagggcactttccccgggcaccctatgttaggctctgcagtctcgtctgtggtctgaggcagtcaccctggtgggaagatggaagcgtggaggtggcagtcagagtgcgctgagcaagggcttttgtgtgtttgaccctcggagaagcagagctaaaattaggtcttccagctgtgtgcaggtgtgaagccccacccccttacctacccccaaccaggatctcagaattattcccatcctctccctcctccagccccagttactccacaggcacaggatgaaatgtcctacctctggtgatgcccggatagaaagatctacccaaatgtccttcaaggctgcaggggtgggggcagtgacaggcagtgaccttaagtttgctgagcctccctagcacctttgaggtcttggtgcaaccggggcccaactggctccttcttagaccaccagacaggatgatgttttggttccctccctgcacacatgaagggaccctggcttctcccactagcctcttgattgatgtgctctgtgcccctactctgcccaccacttcagagagagcctttgacccctcgccacccatcaccattcagacacagatggaagagagctagtctgggggcagagatggaagagccctgccctggggggtcttatccaaggcaggtggagcccaggatgatatgatttgattgtgctctctctccctgcatgaggctagaataggaacagactggccctcctcagggataaatgtgcccctcactcctccttcactatggcccttggaaccctgctctcaggggttccccagctgaggctcatactctttcatgttctggtctggggtgagaacctgccttctacttctggctcctcggtgtacctgcgataggatcttagttaagtagccgctcctcactcttcagttcctttatctgtaaagtgaggggttggggctagacagtgtccagcatccctcctctttggtgtctcttaattgtccagggcagagcaatccttggagcaaggcagcctgctgcggtggtttgcagaagaggcacagtggggcgggctggaggccgcaggggcagagtgggccgagggcctctgatgaggtgtgaatgagggaggcagagcagggctggtgtggacagccctgtcccagccctatctcccgtctgcgacaccctctccacaccccagtgctgataagcgggtgtgagccacggccgccttgtgacaggcccttcggcagggagggtgatggtgggggtccactccacttctgaattcagacgtcagcatctttttcccccaacccccattgccctgtcagactagacaggccctagcaaccaggcaccctccctgacagtccctggcttggagatttgtttctgctccatgtggcctcagccttctcagagatggtaggagacagacctccctcagtcctttctggcaaagtgccaaggaggatgaccacctcccacccccatcaggcccgttcctgcagtgactgctgatgctggggcctggcacacacagtgcttcttatcactgggcaaacttcaatggctgatccttttgtctcctctcctcaccccatctcctctatcgctgtgaccatcagcttccagtcttccccctccagctccctagcttttgggccatttctgtgtctgggcccacctctttcctctaaggccactgttcaccagaaggctgtgccagaaacctcttatttctggattcactgggatggggtggagggaacggaaaagtcttggagaaagagagacagaaacttggagctctagggaaggggaaggagaagacaaataggaccaagccagaggctataggaaacccttcagggtggagggtcttggcccaggtgtctagcccctaggctctatggcactgaactctgaacttccttccatgctctaaaaggctctcttctgtgttcagatctgaagactattttgattagcaggctgcatccatactgctccgggcagtcccactgtatgtgtctgtggggaagggtgtgcctgtcctcctgtgtgcattcctgtctatgggttccattctcagcctctgcatagcttaggaggcatcagagcatcctgagagcacagacttgagccaggcttattagcctggggtcatatctttgccatcttaaccaggtgggggagctacagcaagtagcgtaactgccctgtgccttggtttccccatctgtaaaatgaagatgacaacatggatgatagataataccatataccttgtagaactgttataagtaccaaatgagctaaaataagtaacgtgttttaaaccgtatcgggtacaatgtaattattggccattagtaatatttttgtaaattttattttaatataatttcaaacttagatacggaaaagttgcaagaaattcccatatgccctttatgcagattcagcaattgtttatattttgcacatttattttatcattctctctttcctcatatatatgtgtgtgcttatgatgtactctgtattcgtatctaccatatatagtatatatacacatacgcacatgcacacacatatttttttcagagtcacgtgagaataagttgaatacatcatgccttttttgccctaaatacttgtgtgttttggtaaggacaaggatattctcttacaaaaccatagtatagttattaaaatcagaaaatctaacattggtctaatactgttattgaatccacagtccacgtgtatatttcatcagttgtctcatcatatcttctttctttctatttctttctttctttctttcttttttgagatggagtcttactctgctgcccaggctggagtgcagtggtgtgatcctggctcattgcaacctctgccttctgggttcaagcgattctcctgcctcagcctcccaagtagctgggattacaggcatgcaccaccacaaccagctaatttttatatttttagtagagatggggtttcaccatgttggccaggctggtctcgaacccctggcctcagatgattcacccacctctgcctcccaaagtacaggcgtgaactaccaagcctggcctatttctatttctttttcctgttccagggccactcattgtattcagtttccatgtctctttcacctcctttaatctgggagagttcctcagcctttctttgtgtttcttgaatttgacaattttgaagcgtgcaggccagttatttgaagaatgatgttgctcaaatcctgttggatgcgtcctcattatgactttcaggtgatgtgttttggggatgattgctgaaggtgatgtgtctttctcagagtcttacatcaggaggcacattatgtcaacttttccacttgttagtgatattatctttgatcacttagtttaagtggtgtctgttccccctcctgtagaattactattttctctttctaagtaataagtaattgtggggagatagtttgagactatattcctcatcaaacttatacccactagtttttgcccactaataattttttacaccatcattacttctaaacttactagttggcccattcatactggctcctgtgtcttttgacatttatcttcatccgtctttaagcacttttttgctttctggcacaataagatgttccaggttttctggtgttttcctggctctagccctgaatcagccatttcatcaaggagccctggttccttttaatggagaatgatatttagaaaccaagatttgggtgctgtaggtgctcattcatatggtgtgttattgcttccagttggtcctttttattatccattcatttggatacaatggtgagggcgccactgaagaaagtgtggcttagggatggaaagggggaaaggagccagatgacctaggtagagactcccctctccccctctagctctccaggtcttccccactttctctttcctccctttccctcttcatcatgacctcatttcccttttcttgatcaaaattcctctggagattccagctgtgggaacctctgaaaccacttctgcagctacacgtgtgataccagaggcagacaactatgtgacctttgtgtgtgaaaagccaaaggcaaagacaatttatgagaaagtttttgctgagaacaatctggtgacagggtgattggggaagacacatttggaagatttccacctggacgtgttccttttccctgcctgaaaagcactcagagcagagcctgtgtggaggctgggatagggtgctgtgggaggtctgttctccagataagcctcttcaaggctctggggaccaacgaggaggatttaagtgcctggtgaagtccactctctgtgtccacaagtcacagagacagtttaaaatgaaataactggagttcaatgaaagccacttaaatagctttcttagttatgtaaatgtagggtgaagaatgagtggccttggtcccccacctggagttagtttattgttttgagactagatccaaagcctcctctccctgagatctctggtatgcaaagctggtccctggaggaagcgcatcagttgacagagggagcccagaatctctgtgagggaagaaaacactatccaactgctgctcctgggatttgaagtgaagagaatttgttgggatgaagtgaggtggccacaataaaggcgctgggccatggggcttctgaaatgagattaatatgaggaacacctgagtctagggtggtgcccggggcttacaacaagaacccacctgtgtttcctggggtaaggctgtccttagcatagtgtgaggctaactgctgggagctctggagactctgccatgctgacattgtgcctgtgctcctggccagggactgccacctagatatgagtcacagtggggggcccctgggctccagttgactttgaggagtgatactgtccctgtgaggacgctatgagtgtcctcaatagtgatgtggtagtgctggtcagacccacaatccctattttccttgtttttttgtgtgtttttttttgttttttttttttaaacacgaaaaaacaaacaaacaaaaacctcagaaagtgaaaatccctaaagggagggactggacgtgtcatgtaaattcttgattggttaacagaagaaattaaaagtggattgagggcacctttgtgctctgtgcccaagggaaagttcaaacagctgcattcacagataccagagacgccagtgtcttcaccatcaccagcgacgtgtgggtgctgcctcaacaggtattgggaacttgctcttgtttacagcttggctcctcatggtagctgtaggaggcaggatctgggtggatgggacctgggattcattcttagaataggtccccaaatggtcatccattttgcttgccgagggctctgtggggcagacgtaggaggcctgaggggctgcctgggaggtgatctgaggaagcctcttatggcactttcatggctctcctagccagagaccagagacacctcctctcccacttctgagcgctccatctaccaattttgcatccgaaatagctcccaagcttctcattctctactatccccatcctggtccaagccaccctcatctctccctatagagatcacctgactggttattctccctcattgcactttgtactcccctaccccgccatatagttttgtaactataaacagccttgtttgtggatttggaggtgaatacctgttttcctaacttgattgtgagctacatgaggacagggaccttgtctggttttatctataagatgctcaatgtgtggttgctaaacaaagagtggacagacgcctcggtttccccagctggtccctatgtaggctgatctcacttgatgggagtgagtgagtgaggaaggggaccctctggttctggagcctctcatctggccctgctgctcagtattcattgatccttcaaatgtcagtgtgtccacaggagagaaagggtggcaggtagggctggcagaaggcagatgtgtggctttatagtgatcctatgcttggggctgggtgggtttcagctggggtgtgggagcagagaaattggctttgggaggctctgtgatgggggccttgcagcaggtgggtggtgagggcagcatggaggtggtggctggcctggaagggaggaggacactgggtggctggggtgccaagagagtcctggtgggggctggtagctgggaaggctgggcagggctgcccgcaatcaagagggtgacaatgagtatgaagagtatgcttagtggaagtgaaggcctgggaggctgggaggaccagaggttcgtctcccccagccgcgcccttgctccttgctctcatcttcctcacccttcctgcaccctggccgcttgggacctcctcttctccctgatctggtctttcagaaatctctggcctctaacctctataaccccttcctctcccagcctcccagccctgtccactccccgagtcacatccccaccagccctcctgccctgcctgcagcctgggccctgctgagctgccgtgcccttctctcatcacctcctcctcgctccctgtggcaccttggcaccagccccagatctgtgtgcactgatttcccaacattcctgtcctccttcccaccccactgccccaaagggaggggctcaaggacttgagacgcttcccttggggggcccagctttcccccagagtcagggagggatgaaggcagggctgctggagggctgggcccgcagacctgtggagctgcctagtgggaggtagagggctggagtgggagagcatgcggagccaccgtgggggcaggagatgcagccctgcaaggccacactgctctccccagcttcccactgtctattggtcttgcctggtgtcacctgcccttcccagctctgcctctgacttctgcatctcccctgatcctttcagtttctcatggtccttcttatgggtgattaaggagttgggccctaggccatttctggaaggcaggagttggaggtgagcttcctgttgccttgtgtgtgtaactctagagtcccgtaggtgggtggctgctggacgtgccctgggaggggaaagggacctgtaagggtgtgtccataaacagagcgattctagaactcagggatgctactgtggacaggacttagagattgttcagcccccaccctcttccacaaccatttatagatgaaaacattgggctttaagagggaaataggattgacatgaacgagtcacgtaggggttagtaatcatcatcactgtcatcatactagacatttattaagtgcttactatatttgagggatcattgtaaattctttacaaatcttaattttcatagtcctcacactaccctgggaagcagctgttgttattttccccattttacagacaagggaacagagactggaacagtgaggtcagtttccccagatcacacagaaagcctgtgtcagagcagtggaagtttatcacacacagggaggcttgctccttccaatgatgatgtaagcgtataagcattgttgagagctctttaaaacagtggcagacatttcaccaaagaagatagaggaatagccaataagcacatggaaagatgctcacattatgggcacggtggtgcatgcctataatcctagcactttgggaggccgaggcaggaggactgcttgagcccaggagtttgagacgagcttgggcaacatagcaacacccccatctctacaacattttttttttaaatagctcatgcctgtagtcccagctactcaggagcctcaggtgggaggatcgcttgagtctgggagttcaaggttacagtgagctatgattgtgccactgcactccagcctgggtgacagagtgaaaccccatctcttaaagaagaaaaagacatgctcaacatcattagtcatcagggaaacccaaattaaaattacaagatacacctactcaaatggctaaagttaaaggaaaaataaggctggaaataataaatgctggcatggatatacagcaactggaactctcattgctgattgaaaagcaaacaaatgctttggaaaacattttgacaatttcatataaagttaaacatacactattaatataactctgaaattcaattcctaggtctttacccaagagataaaaacatagccaggtgtggtggcttacgcctataatcccagcatgcctgggaggctgaggcaggcagatcacttgagctcaggatttcgagaccagcctgcgcaacatggtaaaaccctgtctctaccagaaatacaaaaaaattatttggtatgttggtacatgtctgtagtcccagctacttgggagactgaggtgggaggattgcttgagactgggaagatgaggttgcagtgagtagaggtcatgccaatgcactctagtctgagtgacagagtgagactctgtctcaaacaaacaaacaaacaaaatccaaaacacataagcccacacaaacatctatatacaaatgttcatggcagctttattcacaatagcaaaaaatggtaaacaactcaaatgtccatcaactattgaatggaaaactaactgtggtatgctcatataatgggatactgttcaacaataaaaaggaacaactgatacagacaatgacatggatggatttctaatgcattatgctaagtgaaagcagccaggcacccaaggctacaaacgaaaattcctgcacttatatggactctccagaaaaggcaaatctataggaacagaaaatcgatcagtgattgccaggaacagcagactgaccatgaaggagatgagacaacttcttgatgtgatggaaatattgtatatcttaattatggtgatggctgtactgcttaaacatttgtcaaaactcatcaaactgtgcatttaagaagggtgccttttattgtatataagttatactttcctaaaactgattaaaaaataaaaacaatgggctgggaaagggaagaaaataggatggtcatggtcatccttattgcaaaagtgacctctaagacttggaagaggaagcaggggagctagggctgatccctgggggaagagcattccaggtgggagggaacagccagtgcttcagtgccaggccaggacatgcttggcctgctcaggaacctgtaaggagtcggtgttgctgaagtggagcaagaggccggccgtagcggggctcagacaggcaaatgggcaagggatggatcagggctgggtaagggctgggtaaaggcttttcctctgggtgagatgaggctgctagagggctttcagtgagcgtgatccgacttgattttaataggaccacgctggctgctgtgttgagagcccgctggggacaaggaccagtgaggaggccactgcaagaatccaggagagagatgatggcggctcagaccagcgcagtggcctggttgaacttgggatatatttcgaaggtagagccaacaggatttccggccggattggatgtagggtgtgagaaacagagaggaggcaaggatgacgtcaagggttttggcctgagcagctggaaatccagccgggcacccccgtgggggctgttgagtggttttaactgtctcctggggcctgtgggtgaagctgagacagagaccgaagggaggggctgagccctacccctggctctgtggctcagggaataggctgcacatactgattattccattaccctttatttattggccttattggcttttgtcatttccttgtctcctgtctggagtgacagctataaatgtgatagattgatacaggatacaggagccccaattatctctcttaaaccggcttctcttaaacagggagggctctcgggcaagctgtccctgccctctgccttctttgccacaagtcctacagtcttccttacagaagtggcctggttctgccagggggggagcgatgcctgggaggatgagtggcagacatgggccccaaggggagatggctcccaggacaaatactggaggcaagttcggccccctggccagtcgcaccaaggatcccagtgcacactccctgatgctctgcctcacacagaggccagcacagagtggggcaggcgggaagacaggacatactgctggctgctcagcccacatccggggaagggggctccactctgaccttgcatgcctttctggaatccgagccggcctgtctgtccacagaggctgggatgatggggcttttctctccggcagcaggtgcctggcagctgccggggatgccagctccgtgagctggcatgggaggaagtgcttgtcaggatggtcattacacgtgctgggctcaggctggcctggccccgacccctgccactcaggctggcttgggatacccacatgaggatggcgcttcctgaagggaccctggggtccctctgggatgccctcggatggagcttggcaactgccagcctttaagtatcatttctgaactaagttcctcacccatcctctctgcttgactcttctctggcctgtctgcctacctctgtccctgggaaagtcctgagggccctggcccaaggaggtttgggacaggaagcctgacattcattctcgggatttgaggcatctccctgtgcccctcctcatccttgacagactgactacagcctctgtgccttgcatgtgcacaagtgcatggtgaatccacacgtgtttatctggcaagaatttcaaatggtcctgtgtctgacctccttccagaaaaacagagtggaaggtgggactgctggtgagaaaaggggcaggaaacttgaggggacaagaagggttcaaacggaggagcaggtccaggggaactcagcagagagtgaattggctgatcaatcagtttgtttcttctgcaaacattcccagctccttatctgtgccaggtgctggggcaggggctgaagactgtgttatgaacaaacaggtctggcctggccttgcacagcccttagactcacaggtgggctgcacagtaagtgtgcttagagcaatggtggggtgcaaaggtaccgtgccagcacacacagactctcagaagcagccaggggcaggagacgctagttcctgctgttcctctgagcccatcagtggctgccctttggcatctttgccaccacacccttgcctcactctcagttgctgtccccagttgctgtctctgcctgtaggagtgcctgggcttctgtctccctggcccctcccaacctcctgggctttgagtctcgtggccatcagggctgatatcggaggagctcctggcacgggggtagggaagctgccaacactgctgtggcccccagggtgagagctgacgtctgtccaggagcatctctctccctgccaagggctgagatctctgggctgcatgctttcccgctgacacaggagccagcatccgtcactcacagggccacccgctgcctggaccccagcctcaccccagagtgacccagtgacagctgcagccttgctgcaagcacaggcctcctctccctgcctcagccacttcccaggctcactcactccttccaggtgaacccacccacatcccaggccaggtgagggcccacctcaggcagccagggaagaccccacccaaggggccgagaagcgtgggctccaagccttggtttcaagaacaatgcgggaagctgcccgctggcccagaccaaggtggtagttaggatccctggagcttgtgagaaagacctgactcccctcacagcctcacagtggggtcccagcctccagcttccctcctttcctcacacataatagtcattgagttaccaccatgtgccagccactgagctagtcccgggatgcagtactgagtaaagcagacatagactctgttcttgtgctgcttttaagtttttttcactgaggttcctagtaagaagtttattttctatcactcaccaggatacacacatgggcactcacccacattttatatagagctgaatcaacagtttctccaaacaacactcactcttaccacatgggatatactgctattttaaattctgatattctttttaaaaaaaaaaaaacaaaaaaaaactggacatagtctgccatttgaaaagctctcgtgtggctggggaaagatgattagcccagtggtgaatggactatccctgccccggtgtggaccaaggaaccaatatcagaggtttcagggcaccgaaccacatgcctctcctatgaagttggtttacaagggaaataaatggcgccacccacttgggcccctagtcacatcaaggatataaaaaggggtctgagagagtggagggctgcgggaccctgggagtcagtttcttcggagagagctgctgctgtgctgtttccaggaccccagccttcccttgcaggaggttctggcaaggcttgtggcaggcacataccaccttctaactctgggcaggccaagggggcttccagaacttctcagagagctttaagatgttggagacacagagaactgggcctccaggatccaagaaagctcaagtggatgagcgagtgtgatctgactcccgccctgggaacccagaggaagggttgcaggccagctgcactgggggtggctgcagagggcactgctgtcagggcatgaccccacccagagtaggtggggcaagtgctccaactgtttcttatgggccagaggtgggcaggcgaagagagagccagtgtgcaccactgtgacagggccacctggagggacaaggggtcttgccaggaagggctaggctcatggttcccatgggcaaaggaagacatcataagggggtacccagaagagagagcccacaaaaatgccttgtgtgagagcatccctaaccatctgcctggcctggggaggagaagccaccagccaccctgtctctgacaagtcatgggatcgaatgctctcctggcctggctgagtctgtgtttataacacaaactgactgattaggtaaaataacctaagactgagctgcaaagctacaggatctgcccgggttttctccagggccagggaagatgatcgccactgaataaagctaaagagacaggaagggacagagacaaaggctgggttatattacatcagggattgtgtttgttcacataatgactttgcaggtatttgcaaggagtgtggagggctgtggcagggaagcatcaagagtggggcacatggtggggaggggaccgggctgtgtcaggggaggttcccagaggaaggggcattcagggaggtctgaaggctgagtggaaaggagaagagtgttctggcaaggctgggaggaggaggagcctggagcctttgaggggttggaagagatgctgttacagaggttggcaggactggggagacctctgaggggtttgccttgatcctgaggcaatagaaagccactgtgcagtcttatccagagggtaattatcttggatgaaaatatcactctggtagctgagtggagaagagtttggaatggatgaggttagaggaaggagcttccctggtggcctccatgaggcgatatgctggcctcacccaaggaagggacaataagatggagccaaaaggtgggatttgaaagacacgaaggaggtggagccaatggggcttggaccaggtgaggggtgagaggtgagggctgcatgcggctgaggatggatttgtgggaccaccttcacagataggctcagggtgaggcagaggagctcagagttggctgggctgggcctgaaagctctggagatgtccaaagtaagcagctgaatctgctggcctggggatccaaggagagacctggcctcaggaaaagatcaagactcttcaaagccataggaggggaaaagaacgtgttttccactctttctgggagagagcacagggcctaaagaacttgaacattagtcagacaccagaggatgttctgccaggggaggctgaaaaggcacagtcaataagatgggaggagacacaggcaacaaaataaaaaatagacaatggagttcatgaaaattaaagttttgtgcatcccaagacattatcaacagagtaaaaaggcaacccacagaatggggaaaaatatgtgcaaatcatatatgtgataaagaattaatatccagaatatatagagaacttctaaaagtcaacgacaaagaaaacaaccaaattcaaaggacctgaatagacgtttctccaaagaagaaatacaaatgacgaataagcacatgaaaagatattcagcataactgatcattagggaaatgcagatcaaaactacaatgaggccgggcacagtggctcacacctgtaatcccagcactttgggaggccaaagtgggcagatcacctgaggtcaggagttcgagaccagcctggccaagatggtgaaaccccatctctactaaaaacacaaaaattagctggtggtggctggtgcctgtagttccagctactcgggaagctgaggcaggagaatcacttgaaccggggaggtggaggttgcagtgagctgagatcgtgccattgcactctagcctgggcgacagagtgggactccatctcaaaaaacaaaaagcaaacaaacaaacaaaaaaactacaatgagataccatctcagacagattaggatgactgctatttgaaaaaaacagaaaataacaagagttgatgaggatgtagacaaactggaacccttgtgctgtgggagacagtatggcagttcctaaaaaaattaaaaataaaattgccatatgaaacagcaattccacttctgggtacctacccaaaagaattcaaggcaaggtctcagatatttgtgcactcatgttcacagtagcattatttacaatagctaaaatgtggaagcaacggaagtgtccctcagtgggtgagaggacaagcaaaatacatacaatggaatattattcagccttaaaaaggatgtaaattctgaaaatttatgaaaaaaattaagaaaaaattctgaaaatcctgaaaaaaattcctaaaaaggaaggaaatatgttgtgacctggatgaactttgaggacattatggtaagtgaaataagccagtcacaagaggacaaatattgtatgattccacttatataaggcacttagggtagtcaaatttgtcaaatattatatgattccacttatataaggcatttagggtagttgaatttgtcaaatattgtatgattccacttatataaggcacttagagtagtcaaatttgtagggatgaaaaagcagaatggcagctccctggggctgggggaaggcaggagtggggagttagtgtttaatgggtgcagggtggtaatttgggctgacagaaaagttcttgacatggacggtggtgatggtggtaccacagtgtgcatgtgcttactgctacagaattgtacgcttaaaccatggttatgatggtcagtgttatgctctctcagcaagttccccagacttgctcaggagaaggccatctcccaggccctcggtcctctgctaccactcttgtcaaatctcagcacaaggacagagcctagaccaggtcatgtaagccatttattggtttgttttaaaaatatgtattttatttatacatgaagtttggtgagaagtgctcgattagttcagacaacatctggcacttgatgtctgtccttccctcctttttcctactctcttctcccctcctgctggtcattgtgcagttctggaaattaaaaaggtgacagccaggctaaaagctaagggttgggtctagctcacctcccacccccaaccacaccgtctgcagccagccccaggcacctgtctcaaagctcccgggctgtccacacacacaaaaaccacagtctccttccggccagctgggctggcagcccgacctgcctcccaaccgcattcctgcctgtgtagcaggcggtgagcacccaggaggggcacatacctctccaagccttgagagcaaagcatggagatctacaaaaataggatttccacttggagaaatgtcgctgggacagttaaaccgtgtcccacactggactcaaagggaacacaggannnnnnnnnnnnnnnnnnnnnnnnnnnnnnnnnnnnnnnnnnnnnnnnnnnnnnnnnnnnnnnnnnnnnnnnnnnnnnnnnnnnnnnnnnnnnnnnnnnnnnnnnnnnnnnnnnnnnnnnnnnnnnnnnnnnnnnnnnnnnnnnnnnnnnnnnnnnnnnnnnnnnnnnnnnnnnnnnnnnnnnnnnnnnnnnnnnnnnnnnnnnnnnnnnnnnnnnnnnnnnnnnnnnnnnnnnnnnnnnnnnnnnnnnnnnnnnnnnnnnnnnnnnnnnnnnnnnnnnnnnnnnnnnnnnnnnnnnnnnnnnnnnnnnnnnnnnnnnnnnnnnnnnnnnnnnnnnnnnnnnnnnnnnnnnnnnnnnnnnnnnnnnnnnnnnnnnnnnnnnnnnnnnnnnnnnnnnnnnnnnnnnnnnnnnnnnnnnnnnnnnnnnnnnnnnnnnnnnnnnnnnnnnnnnnnnnnnnnnnnnnnnnnnnnnnnnnnnnnnnnnnnnnnnnnnnnnnnnnnnnnnnnnnnnnnnnnnnnnnnnnnnnnnnnnnnnnnnnnnnnnnnnnnnnnnnnnnnnnnnnnnnnnnnnnnnnnnnnnnnnnnnnnnnnnnnnnnnnnnnnnnnnnnnnnnnnnnnnnnnnnnnnnnnnnnnnnnnnnnnnnnnnnnnnnnnnnnnnnnnnnnnnnnnnnnnnnnnnnnnnnnnnnnnnnnnnnnnnnnnnnnnnnnnnnnnnnnnnnnnnnnnnnnnnnnnnnnnnnnnnnnnnnnnnnnnnnnnnnnnnnnnnnnnnnnnnnnnnnnnnnnnnnnnnnnnnnnnnnnnnnnnnnnnnnnnnnnnnnnnnnnnnnnnnnnnnnnnnnnnnnnnnnnnnnnnnnnnnnnnnnnnnnnnnnnnnnnnnnnnnnnnnnnnnnnnnnnnnnnnnnnnnnnnnnnnnnnnnnnnnnnnnnnnnnnnnnnnnnnnnnnnnnnnnnnnnnnnnnnnnnnnnnnnnnnnnnnnnnnnnnnnnnnnnnnnnnnnnnnnnnnnnnnnnnnnnnnnnnnnnnnnnnnnnnnnnnnnnnnnnnnnnnnnnnnnnnnnnnnnnnnnnnnnnnnnnnnnnnnnnnnnnnnnnnnnnnnnnnnnnnnnnnnnnnnnnnnnnnnnnnnnnnnnnnnnnnnnnnnnnnnnnnnnnnnnnnnnnnnnnnnnnnnnnnnnnnnnnnnnnnnnnnnnnnnnnnnnnnnnnnnnnnnnnnnnnnnnnnnnnnnnnnnnnnnnnnnnnnnnnnnnnnnnnnnnnnnnnnnnnnnnnnnnnnnnnnnnnnnnnnnnnnnnnnnnnnnnnnnnnnnnnnnnnnnnnnnnnnnnnnnnnnnnnnnnnnnnnnnnnnnnnnnnnnnnnnnnnnnnnnnnnnnnnnnnnnnnnnnnnnnnnnnnnnnnnnnnnnnnnnnnnnnnnnnnnnnnnnnnnnnnnnnnnnnnnnnnnnnnnnnnnnnnnnnnnnnnnnnnnnnnnnnnnnnnnnnnnnnnnnnnnnnnnnnnnnnnnnnnnnnnnnnnnnnnnnnnnnnnnnnnnnnnnnnnnnnnnnnnnnnnnnnnnnnnnnnnnnnnnnnnnnnnnnnnnnnnnnnnnnnnnnnnnnnnnnnnnnnnnnnnnnnnnnnnnnnnnnnnnnnnnnnnnnnnnnnnnnnnnnnnnnnnnnnnnnnnnnnnnnnnnnnnnnnnnnnnnnnnnnnnnnnnnnnnnnnnnnnnnnnnnnnnnnnnnnnnnnnnnnnnnnnnnnnnnnnnnnnnnnnnnnnnnnnnnnnnnnnnnnnnnnnnnnnnnnnnnnnnnnnnnnnnnnnnnnnnnnnnnnnnnnnnnnnnnnnnnnnnnnnnnnnnnnnnnnnnnnnnnnnnnnnnnnnnnnnnnnnnnnnnnnnnnnnnnnnnnnnnnnnnnnnnnnnnnnnnnnnnnnnnnnnnnnnnnnnnnnnnnnnnnnnnnnnnnnnnnnnnnnnnnnnnnnnnnnnnnnnnnnnnnnnnnnnnnnnnnnnnnnnnnnnnnnnnnnnnnnnnnnnnnnnnnnnnnnnnnnnnnnnnnnnnnnnnnnnnnnnnnnnnnnnnnnnnnnnnnnnnnnnnnnnnnnnnnnnnnnnnnnnnnnnnnnnnnnnnnnnnnnnnnnnnnnnnnnnnnnnnnnnnnnnnnnnnnnnnnnnnnnnnnnnnnnnnnnnnnnnnnnnnnnnnnnnnnnnnnnnnnnnnnnnnnnnnnnnnnnnnnnnnnnnnnnnnnnnnnnnnnnnnnnnnnnnnnnnnnnnnnnnnnnnnnnnnnnnnnnnnnnnnnnnnnnnnnnnnnnnnnnnnnnnnnnnnnnnngacaggaccgaatactcaataaactgagtggcctctgggtcaaatttctcccagatctcatagaacatatcgaagtcgtcctcactcaggggctcggtgctctcctccgtggccacgctgaagttctccaggatgatggcaatgtacatgttgaccacgatgaggaaggagatgatgatgtaggtggtgaagaagaggatgcccacggctgggctcccgcagtccccccgagagccattgctgttgggcagagtggggtcgcagtagggcggcccagtgttgaggatggggctgaggaggccatcccagccggccgacgtggtgatctggaagaggcacagcatgctgttggcgaaggtctggaagttgaacatgtcgtcgatgccagcctcccacttgacataagcgaagttggccatgccaaagatggagtagatgaacatgacgaggaagagcagcagcccgatgttgaagagggcaggcagggacatcatgagggcaaagagcagcgtgcggatccccttggcccctcggatcagtctgaggatgcggcctattcgggccaggcggatgactcggaagagcgtcggggagaagaagtacttctggatgatgtccgagagcacagtgcctgtgggaaacaacagagactgtggctactggtggcacctctgtcttccagccagcatcactgtgcaggggttggcggtggggggggggtctctatatggcaaggagccaaggagaggcggcccttccaggattgcgtccactgggcatgctaggactctgcctgctcctgtctgtttgagtctccatgtctgcatctgtgacccagaaaaatgggtcctttgcagggttccttctcagccccctcattccttaatcttcagtgtgtacctacacaatagagctgtcctaggcccatcttctacatcttgggttctcaggccagaggggatctgcttagtatcttgcccacccagcttgggccagaactcaggtcttttagctccttgctattcaaagtgtggtttgaggaccagcagccttgggatctcctaggtgcttatcagaaatgcagaatctcagctccaccccagcccattgcatcttaagaagcccagatgatttatgtgcccatcgaagggcatgaaacactggcccagaaatcagtgctccctgatgccacgccatggccagtgtcttctctcagcttctctgtgatggttcttatcgctctcctaactctgcctcctttgagggcgtcactgcccctgggtctcc

SEQ ID NO: 1184 - DNA, 1918 bp, Homo sapiens
gtggtaaaaggccggtacctcgggcaagatggctatcaagagtatcgcttcccgcctccggggttcccgtcgttttctgagcggcttcgtggctggggctgtagtgggcgctgcgggagctgggctcgcggccctgcagttcttccggagtcagggcgctgagggagcgttgacagggaagcagccggatggatctgcagaaaaggctgtcttggaacaatttggattccctttaactggaacagaggcaaggtgttacactaatcacgctttgtcttatgatcaggcaaagcgggtgcctagatgggttcttgaacatatttccaaaagcaagataatgggtgatgcagacagaaagcattgtaaatttaagcctgatcccaatatccctccaaccttcagtgccttcaatgaagattatgttggaagtgggtggtcacgaggacacatggctccagcaggaaataacaaattttcaagtaaagccatggctgaaaccttttacctttctaacattgtgcctcaggattttgataataattctggatattggaacagaatagaaatgtactgtcgagagctgacagaaaggtttgaagatgtttgggtggtatctgggcctttgaccttacctcagactagaggcgatggaaagaaaatagttagttaccaggtgattggcgaggacaacgtggcagtcccctcacacctttataaggtaatcctggcccgcagaagctcagtatctaccgaaccactggcgctaggggcctttgtggtacccaatgaagccatcggcttccagccccagttaactgaattccaagtgagcctccaggacctagagaagttgtcaggactggtgttttttcctcatttggatagaactagtgatatccggaatatctgctctgtggacacctgtaagctcctggatttccaggagttcaccttgtacttgagtacaagaaagattgaaggagcccgatcagtgctcagactggaaaagatcatggaaaacttgaagaatgcagagattgaaccagatgattactttatgagtcgctatgagaagaagctagaagaactcaaagctaaggagcagtcaggaacccagataagaaagccatcctagtttttatctcaagatgtgtcataccgtctgtaatgaagcaggcatgccctctttaggctaacatattttagtggctttgctttttgctttttaaaaagtttttctctttaagagatgtggtctcgccgtgtcatccaggctggagtgcagtggtggaatcatagctcactatagcctcaaacttctgggcttaagcaatcctcctgcctctgccccctgagcagctgggactacaggcacacaccatcaccctcagctactagtggctttgctttaaagaaacagtggaatcctaaatttatgactaaaaattcccccaaaagatgaaagatctacaatgtttttgtcagtattatatttgactcaggaactaattattaagggagctttgacacctgcagatggagggctgatcttgtgtcaagttaacaggaagactgcccacagatgacactgcatttgtatccctgtggatgtagagtattgggaaggcatttgtttagtttcatgcctccaaaccatgcattgtctgtgatgtatctgcccagccttctcagaactcaatgttgtacatttttccctctaggacctgaattggtcttggaggcagcttttagaaatcctctgtgtagttcctgtccacatgcactatatatttgtttcttttttctcctctcatgaatctgctcgtttctctacttctgtctacgtagaagcactcagcaactagtttctgctcattaaatgtgttctatatactaggctcagtgctttacatgtgtt

SEQ ID NO: 1185 - protein, 366 aa, Homo sapiens
MAIKSIASRLRGSRRFLSGFVAGAVVGAAGAGLAALQFFRSQGAEGALTGKQPDGSAEKAVLEQFGFPLTGTEARCYTNHALSYDQAKRVPRWVLEHKSKIMGDADRKHCKFKPDPNIPPTFSAFNEDYVGSGWSRGHMAPAGNNKFSSKAMAETFYLSNIVPQDFDNNSGYWNRIEMYCRELTERFEDVWVVSGPLTLPQTRGDGKKIVSYQVIGEDNVAVPSHLYKVILARRSSVSTEPLALGAFVVPNEAIGFQPQLTEFQVSLQDLEKLSGLVFFPHLDRTSDIRNICSVDTCKLLDFQEFTLYLSTRKIEGARSVLRLEKIMENLKNAEIEPDDYFMSRYEKKLEELKAKEQSGTQIRKPS

SEQ ID NO: 1186 - DNA, 2276 bp, Homo sapiens
gtggtaaaaggccggtacctcgggcaagatggctatcaagagtatcgcttcccgcctccggggttcccgtcgttttctgagcggcttcgtggctggggctgtagtgggcgctgcgggagctgggctcgcggccctgcagttcttccggagtcagggcgctgagggagcgttgacagggaagcagccggatggatctgcagaaaaggctgtcttggaacaatttggattccctttaactggaacagaggcaaggtgttacactaatcacgctttgtcttatgatcaggcaaagcgggtgcctagatgggttcttgaacatatttccaaaagcaagataatgggtgatgcagacagaaagcattgtaaatttaagcctgatcccaatatccctccaaccttcagtgccttcaatgaagattatgttggaagtgggtggtcacgaggacacatggctccagcaggaaataacaaattttcaagtaaagccatggctgaaaccttttacctttctaacattgtgcctcaggattttgataataattctggatattggaacagaatagaaatgtactgtcgagagctgacagaaaggtttgaagatgtttgggtggtatctgggcctttgaccttacctcagactagaggcgatggaaagaaaatagttagttaccaggtgattggcgaggacaacgtggcagtcccctcacacctttataaggtaatcctggcccgcagaagctcagtatctaccgaaccactggcgctaggggcctttgtggtacccaatgaagccatcggcttccagccccagttaactgaattccaagtgagcctccaggacctagagaagttgtcaggactggtgttttttcctcatttggatagaactagtgatatccggaatatctgctctgtggacacctgtaagctcctggatttccaggagttcaccttgtacttgagtacaagaaagattgaaggagcccgatcagtgctcagactggaaaagatcatggaaaacttgaagaatgcagagattgaaccagatgattactttatgagtcgctatgagaagaagctagaagaactcaaagctaaggagcagtcaggaacccagataagaaagccatcctagtttttatctcaagatgtgtcataccgtctgtaatgaagcaggcatgccctctttaggctaacatattttagtggctttgctttttgctttttaaaaagtttttctctttaagagatgtggtctcgccgtgtcatccaggctggagtgcagtggtggaatcatagctcactatagcctcaaacttctgggcttaagcaatcctcctgcctctgccccctgagcagctgggactacaggcacacaccatcaccctcagctactagtggctttgctttaaagaaacagtggaatcctaaatttatgactaaaaattcccccaaaagatgaaagatctacaatgtttttgtcagtattatatttgactcaggaactaattattaagggagctttgacacctgcagatggagggctgatcttgtgtcaagttaacaggaagactgcccacagatgacactgcatttgtatccctgtggatgtagagtattgggaaggcatttgtttagtttcatgcctccaaaccatgcattgtctgtgatgtatctgcccagccttctcagaactcaatgttgtacatttttccctctaggacctgaattggtcttggaggcagcttttagaaatcctctgtgtagttcctgtccacatgcactatatatttgtttcttttttctcctctcatgaatctgctcgtttctctacttctgtctacgtagaagcactcagcaactagtttctgctcattaaatgtgttctatatactaggctcagtgctttacatgtgtttgtcttacccgagtttcacttttccaaagtagtcatccacaaagtatgaggcagacagatctaagagaagaaagacagctgaggtagattcaaatcttttctgacatggatggtggctttttactcagaaatatatacctatttccatgggtatttgtgggcctgaggcatgcttggcaagaagagtctggtttctcgtctgctatgcaagccaaagggactttaatgttctttgaattgaaccctccttagctctgtggaaagagacagtcaggaatatttgggaattagacggcaatactttgtggggtttattagagcccatgcttgcctccagagatacagttcttttagtgac

SEQ ID NO: 1187 - protein, 366 aa, Homo sapiens; identical to SEQ ID NO: 1185

SEQ ID NO: 1188 - DNA, 2010 bp, Homo sapiens
gatggtaagtctgtgggcccgtcctcccttcgctggcccagatttcgggctccgactcctacctggagtgtgaatggcagtccttgacggacagccttcaccgtttgctgggcccctagcctggcccttggtttctgacctttattctcccggctcggcctcccttccccacctcgcgtctcgccagcttccctcatgtccttccttcccccgggcatcttcgttttctgcacagaaccacccccgccgcccgactttcttccccccagttactcatcgcgatatctatgttttaatgtctgtgttctctactaagattgttagctccataagacttgagactatgtctgttttggtctccatcatctaaccagcacagtacctggtacataattggcattcagtaagtatgaatgaaggaataaattaatacataattttagtagattagttaactgcccttctttcgtcattgttcagttgaagaatacctgctatccctccaaagtgtataaaaactcatgttgcaatgggtaccttatatttgacaaaaaaaaaaaaaaaattaacacgagctcatttcttgtactttgcggatgtgctaatttaacttgctcctttggatacttggcatctagcaagagaactacccccttggggggttgaggatttgagaaggcatcggggaggattatctcgaaactgactcactgctgaatgtgtgcttggtttctcccactaggaaaaacagtaccagttttactgtcatcttgcaacagcacacatatcagtgcttcagagatgatttggaaatttgatgtgaaagactaataagatcaagtctttattcaaaagttaatgcagtagctgcattttattcactgattataggcaaatcagtactttgcctactgtctgttttcttcatctcataagtaattgcaaaaatgagattttctggttgattagacttctgagccagtcctttgtaaatcacaccgctctccttttccttataatctttcattattaagagccactaattgtgtgtgtgtgttttttttgtctctgccccccctttttttttttttttcatttttaggatctgcagaaaaggctgtcttggaacaatttggattccctttaactggaacagaggcaagggactacatggaaggttgtcttggcactgaacggagaaaggtcaaaaggaagataaaaagtttgttccagagaaggtgatgcagacagaaagcattgtaaatttaagcctgatcccaatatccctccaaccttcagtgccttcaatgaagattatgttggaagtgggtggtcacgaggacacatggctccagcaggaaataacaaattttcaagtaaagccatggctgaaaccttttacctttctaacattgtgcctcaggattttgataataattctggatattggaacagaatagaaatgtactgtcgagagctgacagaaaggtttgaagatgtttgggtggtatctgggcctttgaccttacctcagactagaggcgatggaaagaaaatagttagttaccaggtgattggcgaggacaacgtggcagtcccctcacacctttataaggaccacgctggctgctgtgttgagagcccgctggggacaaggaccagtgaggaggccactgcaagaatccaggagagagatgatggcggctcagaccagcgcagtggcctggttgaacttgggatatatttcgaaggtagagccaacaggatttccggccggattggatgtagggtgtgagaaacagagaggaggcaaggatgacgtcaagggttttggcctgagcagctggaaatccagccgggcacccccgtgggggctgttgagtggttttaactgtctcctggggcctgtgggtgaagctgagacagagaccgaagggaggggctgagccctacccctggctctgtggctcagggaataggctgcacatactgattattccattacccttt

SEQ ID NO: 1189 - protein, 149 aa, Homo sapiens
MAPAGNNKFSSKAMAETFYLSNIVPQDFDNNSGYWNRIEMYCRELTERFEDVWVVSGPLTLPQTRGDGKKIVSYQVIGEDNVAVPSHLYKDHAGCCVESPLGTRTSEEATARIQERDDGGSDQRSGLVELGIYFEGRANRISGRIGCRV

SEQ ID NO: 1190 - DNA, 1319 bp, Homo sapiens
gtggtaaaaggccggtacctcgggcaagatggctatcaagagtatcgcttcccgcctccggggttcccgtcgttttctgagcggcttcgtggctggggctgtagtgggcgctgcgggagctgggctcgcggccctgcagttcttccggagtcagggcgctgagggagcgttgacagggaagcagccggatggatctgcagaaaaggctgtcttggaacaatttggattccctttaactggaacagaggcaaggtgttacactaatcacgctttgtcttatgatcaggcaaagcgggtgcctagatgggttcttgaacatatttccaaaagcaagataatgggtagattcttcaagtttacactcctagcatcattgtttcttctctctctcaaccttcacctatggctggtcttgaatttctgggttcaagtgaccctcctgcctcagcctcctgagtagctgggattacagggactacatggaaggttgtcttggcactgaacggagaaaggtcaaaaggaagataaaaagtttgttccagagaaggtgatgcagacagaaagcattgtaaatttaagcctgatcccaatatccctccaaccttcagtgccttcaatgaagattatgttggaagtgggtggtcacgaggacacatggctccagcaggaaataacaaattttcaagtaaagccatggctgaaaccttttacctttctaacattgtgcctcaggattttgataataattctggatattggaacagaatagaaatgtactgtcgagagctgacagaaaggtttgaagatgtttgggtggtatctgggcctttgaccttacctcagactagaggcgatggaaagaaaatagttagttaccaggtgattggcgaggacaacgtggcagtcccctcacacctttataaggaccacgctggctgctgtgttgagagcccgctggggacaaggaccagtgaggaggccactgcaagaatccaggagagagatgatggcggctcagaccagcgcagtggcctggttgaacttgggatatatttcgaaggtagagccaacaggatttccggccggattggatgtagggtgtgagaaacagagaggaggcaaggatgacgtcaagggttttggcctgagcagctggaaatccagccgggcacccccgtgggggctgttgagtggttttaactgtctcctggggcctgtgggtgaagctgagacagagaccgaagggaggggctgagccctacccctggctctgtggctcagggaataggctgcacatactgattattccattacccttt

SEQ ID NO: 1191 - protein, 149 aa, Homo sapiens; identical to SEQ ID NO: 1189

SEQ ID NO: 1192 - DNA, 204896 bp, Mus musculus
  misc_feature (1)...(204896): n = A,T,C or G
ggactaaaaccattttgtggatgaaaggaattctcatgacatgcactatataattgcaaatctgctgttcagataaaatgatgtaaaattcaaccaaggagaacaaaccattaaaacatgagttattttgattagggtggcatttagtgactactcccctttaatcttaaatctactgtctattttttaataagtcattttgggtgttatattcttatatttaatcttccaaggcaaggataattctgtgtgcttattgttttgttatctgtcttccaggtgccaggatcgctgaatattcccaactgtatgaccagattgtgttcagagagacaccccttaaagctcagaaggatggctgggccagcccccaaggacccaccctccacaggcctgtgtcacctccccaggcccagggcgctggtgaggactggctctggcattcgccctacagtaacggagagttggcagatttctctccccagacagaacaagactcaaaatcaaaataccccatcacattagagagcaccacaaaaattaggcccaggcagttgtcgggtgcttgttcggtgccgtctctccaagtgtcggaccctctgctgggctctgtgcagcagagatgcagcgtggtggtcagccagccccacaaagagaactcaggtcagagtcctctttacaactcgctgggtcgcaaagcaatcagcgctaaaccccagccttatagcaggcctcagtcatcttcctcaatcttgataaacaaatctctggactctatcaactaccccagtgagacagagacgaagcaactactctcttcacagaaaagtcccagaggcgcgagccagcaggatttgccgtcagggctagcaaactcatgtcaacaggacaggggcaaacggtccgatctcacgctccaagactcgcagaaggttctcgtggtaaatagaaatttacccttaagcgctcaaatagcgacgcagaactacttttgtaatttcaaagatcccgagggagatgaagatgactatgtggaaatcaagtcagaagaggacgaagtgcgtctggatctctctccaaggcggggcaggaagtctgacccacagaccccggaccctgactgttcggatagcatctgtagccacagcacaccttactctttgaaggagccagtgagtggcaggcttgggcttcctccttacctgacagcatgtaaggactctgataaactgaatgattatctgtggagggggccctcacccaatcagcaaaacattgtccaatctctgagggagaaatttcagtgtcttagctcaagcagctttgcctaggtttctagaactgtccaaattagctccctaggcttacaaattaccatacgaatgaggttgttttttctgtattttctttcagtatatgcactggtttaaaacaattttgtaataacaaaagggtaaaatgtgctttcgcttatagcacaactctttgagctggcccaccatgacatttaccgccccgacccccatgtcctaacagtggtacccactcatagaataccttctctccacatcccaaggagttttatactgtgactcagaggcaccacaagtgaatctctctctcacggttttttaaaaaaagagactagagttatttaaagagtcatgcttatatgtggcatctctatatttgacaagactcaagaatgatgcatgccagagaccactggttagactgtagccttgtcacgtattttaaggacaccatgctggtgtcctgatcacatttcctttagatgccaacatactgtgactattgaagaggttaaaatgtagccctagcaccaacttgctattgggaaaaacaaaatgtttttacttgtgttccaggacaaggcccagatggtgtgccactatttatgataagtctacagtttccggggtaaaatataaactatttctttcatgtcataaagaaagccaatcttaataaaatacaagccaagttgattattagataagatagggagacttctgaaaacaccctatttcttcatattacaagtaaaggggaattgcctctgtaaagacaacaacaggagaagacatgactgtagacacctgcctcctatcagtacagggtaaatcttcaggtaaaataagacaaaatgcatttaaatgcccctgtcaagagcagttcttcattggcactttcctgggcttgaggttcaactgaatgcccacttgagaagtcctggccacagtattgggcaagagtgtattttctaaacagctaataacccagggcctttcgatgttttggaatatacagaacggagactctggttgctggattccgactagtaacttcccttaccctgtacttacagtctcgtacagcacctcactgtgatgccacacctgtctaactccttgtagacaggaatggaagatgaaaagcaaggcactgtgattcaaaggaaaacgagagaaacgtaaaagcgtcttcctgaaggccccgtgcgtacagtcagaataggctctctatttctgttcccatttctacacattcgggactcctccttcactccttcaccctctcagtctcagttttaacgtttctttttattagaattaggcaacctgctccatttcaagaagatatgatgataaacacactactgagtgttgttgagtgtccagagtgtgtttcatcgctttgcacatctttggctacagagctcagtcctactttgtgttgttcaagtgtctaatcttgggattagactggtgagattatctttcctgattttgctaagagatttcttcagaactcataacttgtgaggagagcctgtaaattggaacctaattctagaatagcttgtccttttcccacatcatctgaaagaacatcactgtgcacataactcttggttccaggttaaaagtagtctctgagctagtacaagtattaagacttaggtgaccgacttcttctggatgggtttcaatgccactcaacctctgaaaagaatcccataacagatttttatgtgtagaaggctcactgcaagaagcatgtgagtaattggaacacagtcctctttatttctacccatcgcatctactccactgcccacaacaggggagaatgcctccatttgtctagtttctgaaagcctggtggttgcacattctaaatcttgcttacaaatcattttcttatttaccaagtctgacacatcttctgttgggggttcactggtctgacttattaccagatgtttctgaagtgcaccttgaagctgatccggaacagctttctcttcaggcaaataagaccaatcaaaatctgggcaaaaaaatagccaggctaaattccctctgattctgcagtatcgatgaagactctgacgacacttctcaagctttcacatccactagagccccatctgaacttctgttctcttcagtttcgacagcttttctccatgagctcctgctctcagttatcaaggtttctggagtctggagaatttgtttcctggttaagaagggatagaaattaaagtgtcaactagctcctccaattcgacttcttttccctcctgatttttttttcctttttagtctctatggcccacatcccagtacagttcatgttactgtcctgtttgagtctcagaaatgagtaattcttcacaccagtgtttcattgcatggtttggtgtcacctgcaaaggggaatgtcacattgtacaaaacgtcttatgtaagtggtcctttaggctctaggataaagctgtagttttattgatcatgtctgtggaccaggctgcagactttgagagcctgtgtgtgtgtgtgtgtgagtgtgtgcttagatgttccctcaatgttatcagttcaatgcttttgtttaaaatagtttcttctgaaggtgggggtggggatgtacataactgggaacgttttatgtacttaaatgttcttactgggttcctgtactgaagggtccaatttttcttttttatataagttcacttttcacctactttttgtcttcatgggggggggggaaagttgtgcatcttggaaaacatactttaaatactgtatataagacaatgaaacttagtaatacccattatttaataaagtttgtaaagtggaaagtaaattttcattgaattaatgggtttgcaccgaaacattctaacgtttccacactgcttggctatattactcattgcttactcattacgtcattactcattgatgtaggaaggtccagcccactgtgggcagcatcatccctaggcaggtcgtcctgggctatataagaatgctagctgagcatgaccctgtgagcaaggtagcaagccacatttctccaacggtttttgcttacagtttctgccttgagtttctgccttgacttccttcaactgatagaccatgagttgaaagtgtaagcaagctgagttttcttgacaggagtctaaaataaatcaatcactaaattaaaaaatcttttcattgacaatgtaatgacaagacgtctctatattattgaactgaaaatttaatctcaatttttgctacaaagtcaggcttatttcatacaactatacattccaatttttctttgttaaaattacagagacagagccaggtggtggtgtcacacatctttaatctcagcacttgagaggcaggggcaggtggatctctctgactctgaggccagcctggtctacaggatgagttcaagggaatccaaggatacacagtaaaaccctgtctcaaaaagcaaaacaaaataaaataaaataatagaaagagacaaaagagagggagagggaggagagaagcatgcttctataaatgggtaattattgatgctttttaaagcaatccacttccaaatataaccataaagtcctagccaattgaggtgaaaatacaggctgggtgattctatccatggagaaaagctgttaagattctttctctagagtgtttctaggcatttctcagcactgtgctgaagaggtccccgatctccctggttgtgacgacttgctggaagtcaagagttaaatccagacaagccaatggcaacaacaaaccaatgttgtctagaagtcctctgaattaactcttcagaagaaacgggcaaatatttaaatctctattaagttatcttttaaggaaaaacaacaatattcagagtaaatgttaatagtcctttatgcaccctgacctctctgtgcaagctatggctttctctagctggccagttatggctacactcaattctttcactcaggaatgagaattcagtaaaagaaacagttgctgcatttccacaacttttatgtcaatgtctctttatcagaaaccttgcatgcacaagatctgaagccttcttgtatatattagtttttactttaaaaaagcctcaagatgtaaatacattctcagttttgtcttctcaccttccacccccataactaacggtgatggaactccgaagctactattggtactatattaaatttaaaaattagataaagccgggcatggtggtgcacgcctttaatctcagcactcaggaggcagaagcaggaggatttctgagttccaggacagcctggtctacaaagtgagttccaggacagccagggctatacagagaaaccctgcctcaaaaaaaaacaaaaacaaaaacaaaaacaaaaacaaaaaacaaaacaaataaaataaataaataaataaataaataaaaattagataaatgtaaaacctcactgaacaaggtagaggagagattttccttgtctccctcttgatccttacctggatactccaaatggatctagggacccagttaatacataaccaattaacatgagaaaaatattactagctttgaatagacatgggatacttccggaaaaataaaaaccaaagaaacgaccagagagcagtagcttttacccatcagtaactttgtgaaagaatgcaagcacggacaaacagatcttcaggcagggtagaacatttgagagagattaacagatatgaggtcaaaggtcaggtggcagatgtaaagtctgaggggaaatgagggccacttcagggctttctgtaggctcaccagtgagcagtctctgatactaaggttactctcccaaacaatctaggtggcttgtaggtaacacaggcccaatgcacccccttctgaagttaggaaaatgtcaactgattttaccttaaaatcatcaacttgtcaattaagcatattctgggatgtatatccttggctccttccattaccctacataactaaactaactcaggacgtttgttgtgcaatgcatttgaaggctcttgtgcaggagctcaatgttcccttgtagataaacggactccgtgacagcacatctcgtcttctgataccctacgatgctctgcaccagctctgcacagaacggggcaatatgtactggattgatgagttttaatgattgactaaccagagttcaaaactcacagaagcccaaagcaggagatagtagttaaatcaggagcatgtggagacaagtatggataacaaataattagcttttagaagctcatatctgcgctggagtgatgacccagtggtgacaagcagttgttgctcttgcggagggcctgggtttgtatcctagcacccatatggcagttcacaactgtctataactccaatcccaggagttctggcaccctcttctgacctccatagtcaccaggcacacatgtggtatacatacatacatgcatgcaaaacaatcatacacataacataaatctaagttttttaaaaatttgtaacagcattagtaatagtgtcacactatcatgggaaggtggtgtttcacgagtctttgctctttcctgcctgttgacttctggagatgtctgttctgtcgtgctctcagctaaacatcagtgtatcaggatggtacctcaaaccatcccgggagttccatttggataaaagcctttcccttagttgcttctggggatataaaggaagcacagagtaacctatcacatagattcagaaagagaagtcaggtcgggggcggcgggggtgggggaggggggataacaggaggctgggggtcaaaagacattgttgctgccgggcagtggcggcacacgcctttaacctcagcacttgggaggcagatgcaggcagatttctgagttcgaggccagcctggtctacagcatgagttccaggacagccagggctacacagagaaaccctgtctcgaaaaaaaagacattattgcctacttgacaatgtagaccataccacaggcaacatctcctttctagactagaaacaaagctttgtttctcagacagtggctttattcatatacagcacgcaattggaaaggacaggaagcagtcagactcactaattccaaagccatgtgatttagcatagcacaaaagaacagggccttaagagttatcagaactttggcttggtgcagacacccaaatgccttgtcggcatagcaatgtgcggctgtccacagagctctcaaggaaccccaaaaagaacggtgtaagcaaatcccttcttccatagatgagttacgttggaggctatgagctgctggcccacaggctgaattggacttgtacaatgtgtaaaggagtttaaaaataaaaatccgaatttccaacttatctaggagaaggagagaagagcagagggtgggcaggcccaattggtcctggattctggagaggcaacgtggtgaggtgtaaggagaaggtacaaaaggcgaagtagcatcattagtgatggccacctgctctgaccaccggaggagtcagttcctttagggccttggttggcagcttgagcatagatgttctagataagtaatgaaggatactctctcgagggaagaggagtgcctatcctgcaaagcatgaagaacatgcagctcctttgagggaactttgcatccaagcccacccactgacagctctgctctgcctgaactcctcagccatccataggctgctaatgtaggagatccaagagtctccctgactgctagcgagtcgcaggagggttaaactactattcatattctgcttcctaaagtcccctctttggcccagactcccttcttgagggacaggaggctttacatatttctccacctgaactgtccaaaactgacgtcatttcctcggacccctcgtgcgctcctccaaagcaccctccctatatgcaatctttctctgagacgactgggattcctcagtggccattgggcaactgtcttctccactcttctcgtatgcacacccctccccgtcctgattgtagccagcatggtatgtctacacacaagcacagtgacatcgtccacccagctgtctgtggtctatctctctacctgcttgatactagccctgaactcactgctaagaagcatgaagggagtttacaagctcgtaagtcagcctgccttgctttcccaggctagaggtaagagccttattatctatccctgcaggcagagtgagcttcacatttcccacagctcttgttcctctagacgcaccacagtcctgggagatgtcgcacagtattgagtttattccacagatgagaaatgttgtgtttagggatccccaatctaaaagggacatctatcaaacctgccctaataaatgaatggacatggccagaagatagattccaatatcccttccatgggctcatctctaagggcttaaattcctccatgtataagcttcaactcttaaaatatgcctccatctcccagtaaccaagagggtgaccaggtttttaatatatggacctttgggacacatatccaacctacagcagtgaggaaggcagaggatatcctgtaaacactgtctgactcaacctcatcgtaggcacttttcatagggagtaagtttctgtggctccaagttccaactagatgtgtgtatttttttttttcttaaactttttaccctctttggaacctgcttgtccatgcatttcaaaaacatggcccccgtgtgtcagtgaggtggctcaacaggtatagtcacttgctgccaaacctatgaagttgagttctatccctagaacaatccttctgcccagcacctcagcacgccgctgctgaccccaagatagaatcagagaactggtttcttcaggttgtcctatcctttacttgctgcaagctcaaggacacaagtaaaacttaaaaagaggaagaggaggagggcacgtggaattgggcaagctcacagctctgccagcaaaccaaatgacttctcttgatcgcaggttctcctggttagaaatcagacgaatggcgttccatttcttacatctgttggggttaataaatatatctttccagcacacaagacagcgtgagcactcaaaaaacggtctctgccttgcacaaattctaccctacctcatttgtggtctacaaagttactatgttattcccactagccttggaaattataaacttggaagactcagtcctaaaaccattgacgttaatctgcttaaggctacaaaaccagcatttgcattgcaaactctaagaacgacatttagccctaggccacctcccacgtaataaacacttccttctgaaggtctaaactggacttaggaccactacctcctgaggaaagtgagctgcattatgaagaccaagggtggcatcaggttttgaggcagaagggctggccatacaatctcagggcaagggctcagcaccacgctgatgccccacctcctatgccttgactttctggcaactccaaccaaaagcttcacgtccgctggcccccgccctgttaacgtcacggccacttggtacagtgccccctaggggcctcagttcctcccacgaggaagagtctagtctttcctgctgctggccctttactgtgccgcttggctctctggtgcctcccacgccagcccggggaagaacttgcagccgcatctcggcgcctggggataaccagtcaccccgcactctgcagcagcatgagcgtccgcctccctctcctgcttcgccagctcggccgccagcagctgccctcgggcccggcgtgtcgcctccgtgagctgtgtcgctcaggcagcagaagcagcagcagcggaggtggtgaccccgaggggttacgcgggcggcggctgcaggatggccaaaccttcagcagccatggcccaggcaatccggaagcccccgggatggactccatcgtcaggtgagtgtcctgtttgtctacaggcaggtccctagccagggacccaaggacccaatggcactctcggccgctgggagacccgagggaccgttcgtagggcgggaaacagagaatgcttggttccgacttgctagagacgccttgcgattggcagagagggcgtgggggcgaaggggaacgtccggagtatgggacccggtagatgagggcatcccccccagccggcgcgcgcctcacggaccgcacgccccgctccacgtgcaccgcccgcctccggctctgatgcaaccgcgccgggcgtggcgccgacaggaaaagggcggtgcggccctgggcgggagagaagcaaggaggatggccctacaatcccgccactgctgatgtcccactactgaaggaggggcgggctaaaccccttgcggaagccctctaggtctaggcgtacggtccgctccggagcatcgctgctcagagagcacacaggttccggtgcagcagtatctggaaagttcattctatatccggtggtgatctgagcagagtcatctggtcagaccctatagtgagtttgctaggccactgctgtgcagaggcacctacctgcaaagggcgggaaagcccttttctgctttgattcccaactggggctatggaaacaaatgagcaaaaataatctgcccccaggggctgtcacacatatatcccgcaacaagtagtcattatttttacaataaactaaactaagctctacaaacttggtgtaatgagcatgacagtaaatacttaaggttcagtgaactaaaaagcagaatttaaaatgttacatgggtacgtttgtaataaggaaaaacgttctcacagttttttgataaaatccaacattttatggacactgacatttcaatttcatgtggttttcacgtgctatgaagtatccttatttctgtttttctaccagttgtttaaaaatggaagctcaggctagggagactgctcagttaagtactgagtaaaagtactggctgggggaaacatgaagacctaagttccatccccagtacccatgtgggcatggtggcatactcttgacatcccagtccctgagaggcagagaaggtcagatcgtgaagctcactggccagcccacacagcataatccagaccaatgacaggtcctgtatccaaaattaaagtgagcaactgttgagggacagcatccagagttgacctatggcgtgtacacacaacacacatgcatcagaacatgcatccttgaatatataagtaaaaacatatgtgtgcatgcacgtgtccttagctaaatgggtggctctgcttcagaaccagaggtcagtgcttaggaatcggatgccttccttctgcagtgtgcctgtgtcactgggtgtgtgagcagggacaagctattggtcttaccatgttcaactgcaaatggagatcataatgccacctacttcaatgaagcaattctaagatttatactaacccagcaatctgaatgtgtgtgctggagacagtctgggagatccagtggtcatgtgagcttgaaacccagagtcttattactgaaaaagaggagttgggaagactatctggaggaagcagctggggtcggctttattttcacagctattctgtaacatgtatctgataatggccaaagcaaagagttttaaaacagctctccacttctttgaccatggaccctttctctaaacacttctggctgtcttgtgtggagatgtctgtagagagtcggctctgtattcctagaaggatccttttacctatgaaagggctgagaagttaaatgaggactttagttaacaagtgctctcggcattctgcatcggggatgaggataagtgtgcattgatgattttctcctgttttctcctacacttgggtgtggtcacagctagcctcagggagaatgaggagaaatacagttgttagaacaaggcagctttgtgctgagctcctaggcttaatgcagttagccaggcggaggtgactaagccggtggtagaggcagaaactgtgacagtatcactaataggggtcacggtagtgcagtatcactaataaggggtcacggtagtgccgagctaagcttaaacctttacccacctgtcttcagtaataggaaaatttgaattttagctacactgttcccagtcagaattgaagttttctttcccaagggcatagactcatctttggaaacatttctgctactttttggatgtttggggcctaggaatgttcccgtattgtttatcgcggcaggcatcacagcaagaaatggaaacaacatgtggccagttgtgggtggccaattattgccttgttgagcccctttgtgtagctataacttctttctgccccttacttcaactattttaggtcggtttatttctattctgtgtgtatgggagtttgatctgcatgtatgtctgtgcaccaacaatgtgcctgttgccctcagaggccaaaaaaggaggcatctaaacctctggaactggaattacagatagtagttagcctctatgtgagtgttggaactggaacagtggccctttagaagagcaagtaatgcccttaactgctgagtcatttctccaagcccttgacagctaacttaaaccaagtgataatttgtctattggaatatccctttcattttttaaaaattggggctagcaattttttaagtgtagtttatggagggtgggcaaaactggaggggtttctgttacaaattcttatgtttaagaccatgaccagtacctgacagggagcaccctgagggaaaggtttgagtttatagttcaagtggacactcccgtagcaaaagcttgctgctaggagcagaaggcacttgggcacattgtatctggagtcaagggaagcaagagtaaacagaagtcggaccaggctataaaaccttcaggcgcacttcctccagcaaggctccgcctccttaaatgtccacaaccttcaccgacagcagcagcaacagcaactggttgtcaagggttcaaacacatgattatagagaggttgcatattcatacaggtagttttagtcatgggaaaaaaagaaaaaaaaccatcccaacaataatgaaaagggaaagagccaatgaaacctattatacaggtgagaaagtcggaacccatagattgccccccacccagcagtatactggagggttgagtgccaggtatggctgttatccacagaatatccacaggggttccagaaccccctggcacttatttaaaatgacacattcctggaccccagccaagcatattgaaccagaatttctgagatggaatcttgattttgattatgcttcccaggggattcttagagtcagaagtgctcggtgcagtacctcccgcagaccaagccaacacatagacccagcttggcccagagctctgccaggctgggcgacagtgcagcaaagaaacctcagcacccatcccaggagccacaatctcagcttttcagaatggtttcacctattannnnnnnnnnnnnnnnnnnncacccccgcctcccagggattgaactgtctcgtcccaagtgtctaagaccaaaaccaaacaaatgatttgctaacagtgcacagttgcctggccactggctctcttagcctctgtggcattaggaaagttgactcccatgcaagttttaaactctctgtggtcttgtgagtaccctgttcccagtatccctcggcactttccacttcacagttcctcagccaccacactgcaaggtttggttttctaatggcatctgcctgaggctaattcatttttgaaagttgttgggtgcatgtagtcaataaaggcatcctgaagccatcagtgacttgcaatacttgtctagctcatgtgagaccccaggcttactctgccatcattgggggggggggtggctgaggggaataatgtgttaacactgaaactgggcactgcttgggcctttcaatctgctctgagaggtggaaacgaaaagcagactgactgctagagatgtgccagtgaggacatagcgtagaggtgatggtagctttcagaatgacccatctagaaggttctagaaagaaagtctgtctctgccatatttatataggtctgtttctctcccagccctcactgggcgaggggtcaagactacttggagaagaacaagctgccccagcagggtaacattgtcttttaaaagatccccccacccccattggctacagcatcctatgccttccacacctgcaacttcctgctgtcctccctcctcttctgtctttgaatcctttctttaaactctgggagctggaatctaactggaatttagacaccatttcattgtcccacactcaccgtccacttagccatcaccattttcacagacccctctccacccccaccatttgtttgcttttcccttcagactcgtttctcctgagggagaagtaaggcaacgtggtgaaagaatgagattgtttcgaatagaagcccagactttctcttccttcattacatttatttgtttgtgtgcatgtgagtgtgtaagtcagaggacaacttgggggaggagaggtcacctcagtactcttcttttaccaaatggatccagggcatgggcaagtgacagattgtcatcaagcacttttacccactgagccctcttcactggctccaagcttgtcattataacaaacttggaaaacacaggagataattttaatctcctcagaaatgaatggccacgttcagttcttctgagtcagggtttcaccgtgtagtctaggctggctttgaatttacagtcctctcacctccacctccctagagctgggaccacagctctgtgccaatacacactgcctgcatcaggagttcttgttgcctgggtgctctgctttccctcacactctgatcagtctccctctgttgtctgattcacttacatcagcaagctctgtaaggacactcattgtgcctgccctaactaatcattaacaaggacatgactgtgctgtgtttctctctccatatagagacgtcattcacaattccaaggaagtgctgagcttgttgcaagaaaagaaccctgcctttaagccagtgcttgcagttattcaggtaagttgtcagcgtagcactcttttagctttttgtttgtttgtttgtttgttttttgttttttgtttttttcgagacagggtttctccatgtagccctggctgtcctggagctcactctgtagaccaggctggatgtaatttagcaaatgcttataaacagaggccagacgcatggcctgccagtggccagtgctgttacgtggttttcttcagcagagttgcaggttagacacaactcttttgtagtcagttatctttctgaggcataggttactcattgaggtcaggaggtaggcaccgtaaatcacaggacacagaacagttcctaactcacatgtacttaagtgtacttgatatggctggcaagtctgttctctcttgtttctggggaagacaagtgggcaatggcaggtgcacattaatgtttgacaacttatgtgtcaaaagccatgagtgtatcagaggacttggcattatgtgtttgtcctttggctgctgccccttagtccagagctgcagttggcactgtgtcattggcatccttgtatggtggcaggtgcagggaaataacaggatgagccaggcctggaagcgatttggcccagtagccggcctgttattgtgatgcttggcaggctggtccagtatcaggatagcacaccatgtggccaatggttccttggtttgtgagattgtaggactgtgctcatgtgacctgcatcctttgggaaacttccatatcccctcctagcaaggggacttggtttggggacttggaatcctgggaatctgttgccattcaacctaagtacaagcatccaaactcctgtctttggtggttcacacagcatgatgctggctttgtggccgttatgatgttatttttatatatcccatgttttagttacttttctattgctgtgacaaaacaccatgactgaccctggcaacttataaaaggaagcattcggttggggtatggtttcagagacttaaagtttactaccaagcaaagacatggaggtaagaactactgggaaataacatcttgatcctccactaggaggcagagaaagacactggaaatgatgcaagtctattgaaacctcaagcccacccccagcaatacacctcctccgacaaggccacgcctactaatccttcccaaacagttccatcaacaggggaccaagtattaaaatctataagcctgtagggaccattctcattcaaaccaccataccctataacatgcaatctatcgtttttttttaaaggatataatgtgttagtctaagaagtttatatgtacataactccagctgttagcccagtttccataggcatttagagtcttttcagtaattttttgatcatcttttttattcaggctacttgtgttcattgtctttgcaagtgtgatctctgtgttgtgtttggtacacattgtgaaggtatctcacatcatgacattctcctttctgctcctttgtccttaggccggtgatgacaatttgatgaaggatatgaaccagaatttggccaaggaggtgagagctggcgattctagcaatcctttagaatacctaatgatttgttctcttgtgatgacagaatcttacgtttcctttcaggctggtctggacatcactcacatctgcttgcctccagacagcggagaggatgaggtaatgtcagcctagctcatttcctttcctcatcgggactatgggcatcttctggggtggtgggcacagatccagccttctcttgtgggtgagtttccatggagatcagacatgaatgatgtttagacatcagcagtcattggctaggcaaagcatcccaaagtcaggagagctgcagcacttccttcctgctagcttctctgcagtatactgccaaaccaaagatggtaggtcagctctacctgtcgcagtcacatttgcagtagggtcaaaagccattccactgataatgggggttgttcaaaatgattatcgatggatacagagactattagatggggaatgacacccagcagatagataaagttgcaagtagtatagaccctacagcactgcatggcttctctctggcttaacaaagattgctgatgctcttaggttttggcaccactattcagtcaaagaaaagttacataagcaccaatagtgtgatgctactgtcatgctgattagggagctcgtgactcctaagtgacaaaggagcggccccatatgcaggtgtaggtgtgctagacaaggggctgattcatgttcggttgcttctagatctcaccgtgctactcagtgaggtgtacagtttcaaactaatgaattgtttatttctggaactttcccttgagtgtttcttttttttgtaacacagttgatgaagagtaactgaaaccttggagtgtgaagtaacctgtagtctcctgcagggctgggcagaaaggttttcatttataaagaggagtaagcctaagtgtgagatgagatgagggagcaccttggtggtaatcagccagcctgttctcaggggttactgtctgtgtgttcagcctgagggtgccccagggttcaggcatctggaaagagaaagcttgaccaaaagtttgctttcaaacgtatttggttttgcttggttagtgggaactcgcagttggtccagccagtgaggaaatggggttgtgctcttgtagtctgtctttctatgtccttaggaactgatatgaactgagtcttctctagatcctatggggaaaggtaattctctgaagtatacagaggttgtgggtgaaggtctccactgcctcttttccccagcatctcaagtaaagtttattgacctgactaatagggaaaagaataaaggcaggccccatgtgcgtgctcttccctctaagggtgttttctgcaaaccaaaaatttgctctgctgcaccacttgcattgtctggctacactgtgaaagggaggaggggagatgaagtcttaatgccatttagatcatttctaaggaagaagggaaacgaaatattggacaaacagttaatactgtatttgccagttatgctgtgtgccaaccatgaaggcacaagcagagacagaatccaaagaagcaggtcggccatgtccaggacactcagtgtatacaggcacatcttcatttctttatacagtttcaattgtgtagcccaggctagccaggaaacactatgaagcccagtctggctttaaactcataatccccctgccccagcctcctaagtgccaagattatggttgtacacccaacatatttttataaggatttgtccacttccactgctttgttgtaggggctgaaatttcaatgagtctggcattattatgttgaacatcttaattgattaagcttttatttccccagttgtgttttgcttttattagtgctttcccattctcggtccagataaagcgagatccttactttatcctgagctctgcttccatggacccactgaccaccctcatcctgtgactcttctccctttgacctgctctgttttctcctacattaccgatcactttcaggacgtagattattacaacagttggagaaggggcggggcttgcttccctattagcatatcatgtctaccagagcagttttgctcacagctagctggtaggtcccttgcttagaactcatacgaagctgatgatcagaacattttgtttgtttgttttatttaaatatgggatggctgggtatgtacacatgagtgttgtgcctagggagctccgaggtacctgatctcctggagcttgtgagccatctgacatagatacttgggacagaactctgggtcctccagaggaacagcacgctgagctatttctctggctcccagcttcgctgagtttgttttagtggcagaacaacaacaacaacaaaaagtcatcgaggctttaaaatactttggtgaagacaatgggccaggaatgccagtctctgctatagacatcagaggctccctgatggctgttttgagacctctgtgttgtctgctacaagactctgcaggcctctggggttgttggaagctcctgatgtgttactatgttctgaatgaatgtcaccagctagtcaggaggatgttagattaaataaatcagtaggcagcaagtggctataaagggaattagagacagcccaggatcatttattcccagatctccaactctccacgatcatgatgttctaaccagccttgtagaatctttaacaggttcctttttttttcctagaaacttccggttcacagctaaatgaatgaggcaaatattctttctgtaccaaatagcattttccttctctaccagatggtagtaataacgtagatattgttgccaagcaataaaataaaaggggcaaagtgacaccgtctttgagtgggatgcacatgcaagggatctttctactcctgggtcagtggttctgttaagtgaaatgaatcagtccgagtgagtttctgtccgatgccgtaggaaaggctcctggcacgacacttggacctagtgaaccagagagctgtgactggttagagttactgttgggaaaccttttgagtatgtgattgcttggacccccaggttccattggacctggttgaggtacttggctgcttccagacctcccttcacactgggatgtttgtctcaaattggtcatcgtcagggaattggcttttgtctgctaacctggagtaacagtgacgctttgggtttttgttgtagttgttcttttccaatgcattggcaggacctcaggaactatgaagctgtcgaaagttttattcatccaggtttctctggggcttctctaagctgtaaagagggaacaggctctttgctgtacctcaccccagagtcttcaataagaagtgaaaagaacctaacagataacagttttaggaatctgggtatgtgtgtatacacgcacaggtgcttgtgtgcacatctgtatgcagatgcacaggcgtatcatagccagaagacaacctcgggagccagccgtccttttcatttgtggtacagggtctctcattggcagggaactcactttgcaggctaggctggctagtcaggaagtcccagagatctacatgtccctacttcccgagagctgggatcacaggtctatactatcaaggccaaccatttttttaataggttttagaggtccagctaaagtcatcagtgagcatacatgtcaccaatgtgccatctctctgggtctatggagaaatccctttcctaccccatcaactttttttatttttactagttctcactttcacaaagctaatgtttttctgtttagatcatagatgaaatcctgaagattaatgaagaccccagagtgcatggccttacccttcagatctctgaagattcattgagcaacaaagttctcaatgctttgaaaccagaaaaagatgtggacgggtaagaaatataaaaggaaataattaatagtaatcaatcttattgataagtaactgaagtgatttatctaaatttcaatttttttgttactcaataattagttagacaatcattttaaataggcttaggaggtagagaatgtttaaaattccgtgaatgaaagtcctgtatcttggaaaatacgcatctgtttggagagaatcctgcactatcgtacttactcaggaagctcctgtttgtctgactgagtctttggctaggaataatcttccctgggtaattctacggaacagggaaaggaagactgagataacaacacatgtttttattaataatacgagtttctaattaaatgtagaggtggggggaattgtgattgttgggtgttttgtggaatgccatggtaagatataagtatcacaggagagtgaatgccatcagcctacagtgtggggagagagtgtttcctagagagtagaaactccattttcttatatggaagcataggaaataatttgtcctgtagctgaagcaatagggcttatttgggacgataaggtcgggaacaaatttataaagttagatttctgtctagtgtatccttcagcagctgcattgaaagcttggtaatcctctgaactatgctggattattgcagtctctcttttctttcttacaaggggaagacaggctcaaacaagagaatgttatgtaagggctgggctataattcagggggagggtgtgtgtataggtaagacacttgagttctccggaatatagatatggatggatggatagattggatagttagatggatgataaaacctccaattctatagcagagtaatcaaagaaagaagatgtagttgtggaccaggaagccccaaggtcttatgaggatatagtctcagacatttcatacaaggacagagtcatagaaacctgagtgtcttcattctgctactacagaatgaggtagagggcatcatcttgtaagttctttgctctagacttgagtggaagaaagcacacagaagccactgtatagcaagcatgtgctttcttgatgttctaccctcatttcccaaggaaataaatactgaagccaagtggaagttgacctgcgagtctctagattgatagactcagtcctgaggtctgaaagtggacagctgatttcggggactgttggagccattgaaagtgtctctgaaactaggacgtgaaacatggccttctgctgggtcctagggagtttcctgcatcctcccagtcattccgtgttccatttcagtcatgacttgctgtccccctggatgatttgtgattcactgttctcttgcgttcgatttcagggtgaccgacatcaatctggggaagctcgtacgaggtgacgctccggagtgttttgtttcacccttggccaaagctgctgtagaacttgttgaaaagtcaggtctggaatgatcagttctgtttatcggggttttggctttgtttgggttttcaataaggatttgttgctggaagattctaaatgaaacataaagagaaacgctattttctccctactgctatttagataactttttaaaaataataacttgcttctggaaaattctaattgatgtcttaaagtgctatctagtgttggctttgtttctctcaggttttaatttgcatgtaaataagctaactgaaagtattttctttttttttttcttgtttcttctttgtttttttttttgttttgttttgttttggttttttcttgactttttttttaattaggtattttcctcatttacatttccaatgctatcccaaaagtcacccataccctcccccccactcccctacccacccactcccactcccactttttggccctggcgttcccctgtactggggcatataaagtttgcaagtccaatgggcctctctttccagtgatgaccgactaggccatcttttgatacatatgcagctagagtcaagagctccggggtactggttagttcataatgttgttgcacctacagggttgcagttccctttagctccttggatactttctctagctcctccattgggggccctgtgatccatccaatagctgactgtgagcatccacttatgtgtttgctaggtacccggcgtagtcttactacagacagctatatctgggtcctatcagcacaatcttgctagtgtatgcaatggtgtcagcatttagaggcaaattataggatggatccctggatatggcagtctctagatggtccatccttttgtctcagctccaaactttgtctctgtaactccttccatgggtgttttgttcccaattgtaagaaggggcaaagtgtccacactttggtcttcgttcttctcgagattcatgtgttttgcaaattgtaacttatatcttgtgtattctaagtttctgggctaatatccacttatcagtgagtacatatcatttgagttcttttgtgattgggttacctcactcaggataatgccctccaggtccaaccatttgcctaggaatttcataaattcattctttttaatagctgagtagtactccattgtgtaaatgtaccacattttctgtatccatttctctgttgaggggcatctgggttctttccagcttctggctattataaataaggctgctatgaacatagtggagcatgtttctttcttactagttggaacatctcctggatatatgcccaggagaggtattgtaggatcctccggtagtactatgtccaattttctgaggaactgccagactgatttccagagtggttgtacaagcctgcaatcccaccaacaatggaggagtgttcctctttcttcacatcctcgccagcatctgctgtcacctgaatttttgatcttagccattctgactggtgtgagatggaatctcaggggtgttttgatttgcatttccctgataattaaggatgctgaacattttttcaggtgtttctcagccattcggtattcctcagttgagaattctttgtttagctctgagccccattttttaatggggttatttgattttctggagtccaccttcttgagttttttatatatattggatattagtcttctatctgatttaggataggtaaagatcctttcccaatctgttggtggcctttttgtcttattgacggtgtcttttgccttacagaagctttgcagtttcatgaggtcccatttgtcaattctcgatcttacagcacaagccattgctgttctattcaggaattttcccctgtgccaatatcttcgaggcttttccccactttctcctctataagtttcagtgtctctggttttgtgtgaagttccttgatccacttaggtttgaccttagtacaaggaaataggaatggattgattcgcattcttctacatgataacaaccagttgtgccagcaccaattgttgaaaatgctgtctttcttccactggatggttttagctcccttgtcgaagatcaagtgaccataggtgtgtgggttcatttctgggtcttcaattctgttccattggtctacttgtctgtctctataccagtaccatgcagtttttatcacaattgctctgtagtacagttttaggtcaggcatggtgatcccaccagaggttcttttatccttgagaagagtttttgctatcctaggttttttgttattccagatgaatttgaaagtattttctagtaagattgcatataaaagcgatggctccaaacactagcattttaaacattggtttctctcaaggaacagtcaaaataaccgcagtgaaaatgtctcctggtttagcaagcctgtcactgcaggtgcaggtaaatcacaggtggacctgactgaggaggtggattttgcacggaaagagtccatctgagacctagtaacaagtgggtctgcttcggtaatttcttacattcttttaatcctcacattcctgtgccaggaaaacggacacaaatgagtcgcctttttgattaactaataattactgtgtgtcctggctggttttgtgtgtcaacttgacacaagttggagtcatcagagaggaagaagcctcagttgagaaaatgcttccatgagatctaactgtaaggcacttactaattagtaatcaatggggttggacccagctcatgacagatgctgccatccctgggctggtggtcctgggttcgataaaaaagcaggctgagcaaaaccatgggaagcaacacccttccatggcctctgcatcagcttctgcctctaggcctggccctgtttgagttctgtcctgacttcctccagtgatgggctgtgatctcaaagtgtgaacccaataaaccctgtcctccccaactggctttttggtcacagtgttttgccccagcaacagaaaccctaactgtgagatagatcatgtatttaacagcttagctaagacactgtgagatagctggtgtatttaatgacttaactaagacactgtgggatagctcaagtatttagcagcttaactaagacactgtgagttagttcctaacttgagatcacagaagctcaacttggccccagtttgcagagaaaagaagcagatgcccctcccttagcctcaaacattcaacagtcaaaagtccaaagatatttcggcgaagttctaataaaaggcggactttccagatgtaccttttagtcagcagacaccagaataaggtctgtgagatgatctgatgtgtcctgccctgcaggtctttctagaaactcctagaggcaacttacagctggtcctatatttataaggaactgtagaaacagagggagccttaagactcaggaacgaagggtggatgaggaaactctggatagctacggccttcttgccaagtgcatggtcagcgcctgtttttgtttgtttgttttgttttgttttgagacagggattctctgtgtagccctggctgtcctggaactcattctgtaaacaaggctggcctcagaaatccgcctgcctctgccttccaagtgctgggattaaaggcgtgcgccaccaccgcccggctactttctctaattttttaatgcttattctattttgttcaagtctacctcttattctgctctaactcctctcagacgctccacccttcaatcttccttctaattgcatgttctttaagaaaagaagacctactgagtacaattagtgttcactcaaatgcatgtgtgctgtccactgtagcatggccagcctaccaggggccccactcctgaagaatacggacttgctctatcctggtagctatcaaccgcctgtggcttcttaactagaagtggggccttgcaagaccccgtccgtgctggactgttgagtggattggtcctgtgctagcaaccacagctcctgggtgaagccgtctgtcacctccagaaggcactgttttacagcaatcttccctgacctctaatttttatcatattcccactctctcttctgaggtgttctccaagaaaagccacttagaagatgttctttcagctaaagggacctgggaggaagttttcggtggtgtgagttttaatatcagcttttctttggtcggtagggatcactttggatggaaagaaggtcttggtcgtaggggcgcacgggcccctggaagctgccctgcagtggcttttccagagaaaaggatctatgacaatgagctgcccctgggcaacacctcagcttccagacaaggtaggtctctcgtgggcctctacgaccttggcattctacactagagaagagggaaggctggggtgtgtaaagtgagcactagacaggaagctagaggtagaggtagatcttgaaggaggaagacagtaaaaagcaaagtctgttatcgtggctcgtttctgcagtcgaggcaggggcataacaaaattgcagagagagtcaatgctcggacccttgcttgccagctttctcttcttacactcttctggactcccttccactctgcctagggaatggagccacctatgatgggctgggtcttcatacactaagactacattaaaaagcagcaaaagggtggttacaaattaggggtggttacagcaaacatttagttagtggttgctgtctggtaaaaggcttagaaatcaataagacagtgacaatctatagaaaaacagcagatggccatttataggcatatggtaatagctgcctagctccttatgcttatcagccatgctagcaataagtaatgacaagtattggtgttggcaagtttgtgtgaacacaagaactgacatatcgccgtaaagatttcaaagagaaataagctttttaaaaagtcctctaggggctggtgagatggctcagtgggtaagagcacccgactgctcttccgaaggtccagagttcaaatcccagcaaccacgtggctcacaaccatctgtaatgagatctgactccctcttctggagtgtctgaagacagctacagtgtacttacatataataataaaaaataaaaaataaaaaaataaagtcctttaatagagtttaaggaacttttttgaccctgacattttcctgtctgaaaatgtcatagaaaaattcttagtcatataaacaagaggccatagtcaagggtttggggagctagcttaatagttaacagttgcatagtgtgcactgaccctagagcagcatgtttactatacgaaataggaaatctgaaagcacacccagggccaagaggagaaaggaggggcccaaggggacttcttccttttccttttagtaataaacttactcttgtttgttcttctgtattgaaagctcagctctaaggttggagaggtggctcagtgggtaggacccattgctaagcatgcatgaggggctaagttccaagtttcagaactcacttaaaaatctgggcatgatcctgtgcacccatcaccccagcgctgtggtggtagaaacaagagggtcctgcagcctcgctgcagcttcatagagagaccctgtctgaagggaataaagagcagcaggatggagtgggacagctatccagtgtccccctctgggtccaagtgtgcacaactgtgtggttgagcccgcatgcacacacacaccccactcatcctagagtaccagagaaaggaatggcataacagttctgtggggtttctgtagtccttcacatggcgctgagagtgaggaagggagtgacaagcgctcacccttcagtttgggagggagggctggatgagctgcacccctgaggactgcgcccctcctcttgctctccacctccatctctgttcctcccagagtcagtcaggtactcaccccaggggaatcattgctgagcatgcttccccgggttacatgatggtcaggggagacagtcaagtcagtggacggcacttaccagactacctggctcgtaattagggctcagagggttggaacaatctatcttttaatctcctattttctttcctgtctccttccttgacttagagagttccatgtgtagtacctttaatatttaatgtttatgtttttttacttgttcatactgaaggaaaatgctgagtggtttttgcataagtttgtctatgtctgggttgggtgaactttaatgaaataatatctattataaaggaaaataagggaaatatgtagctcagttggtagagagctagccttagcatacacaaaggcctggatccagtccctagtgtagcatgcctagtggtgctggcctgcctgcaattctgatgctctggaggcgggaacaggaagattagacttcaagatcagtaagagaaggagcaaaagtgggtcttcgtgaggcgatggaggcttgcttgagtgggtctcctcagcggcggctggagtcggtacgtccttgcctgagcacatcagctgaggcgtctggcagcaaactccagctccagaatttggaaatactacacacctggttggcaccaaattgtaaaccacaggatgggtattcagtgggcatgagagattgagaacatcctaccacaccataaacctggatgtagatcacttccttttctctggattgaagtcagagagcacaatgaggacaagaaatcctcaaagaaagcggcgtggtgcagccttaaattccagacaaacccagaagcgaactcgggaaacaacttcaacccctgaggttgccttggaaacagaacccatagaacttatggaaactgttggagatgaaatcgtggacctcgcctgtaaatctttagagcccgtggttgtggacctgactcacaatgactctgctgtaattgttgaagaaaggagaaatgggaggaggttgcgccaagaccatgctgacagctgtgtggtgagcagtgatgatgaggagctgtctagggacaaagacatgtacgtgactacccatactcctcgaaacaccaaggatgatggagctcctggacccaggcgctcaggtaccctcaggtgtccgatctgcatggatggatactctgagattgtgtagaatgggcgtctctgtttctacagaatgttgccacgtcttctgtagccagtgcctccgtgattcccttaagaatgctaacacttgcccaactagtaggaaaaagatcaaccataagcagtgccaccccattcatatatgagatgttcacaactgctcaggatagaccaatggacagacagacagcctggcttttctgcttggtatctgcctccagtttcctgagctcaaaaagactttcaaaaatcaatgtctgatgtaaactggtcttttgtttcccaaccccttagattcttttgttatctcatttgatgctatggagcacggtccagggatgctcccagatcagatcagcatctctgcccctttgggtggtctgagcccagagtgggaaaaaagaagtcgggcatattggagttgagcatcatggctccagcctctttatggagcttacatgttggccaagaagtttccctgttgggaacgtttgccccagctcttgtgggtgcagaaccttcccaaggcacctgtctgttagctactctgcctgccaaacagtgacctggccagacagcccaaatagcccaaggataccagtgcataaactgcccatgaaaagcctaactggtgaacttttagttttccttcccatgagagcagaggagacctatgactctgcctgaaacttatcattggtgtacagcgttttctgcaaatccagtgactctgcagggcgatcctgtttcctaagaatgagaaagtgcagtaaaacccgttcttcacctgctctccagcagtctggaagctgtagcactgctggtatcctcagcccagtgtcgcctatgggagcagtgctcatcccaccccacgtctgttcaccagctgttctcagggacctacccatgctccaaagctcttttactggcacagaacattcaaggctaataggacaagcaagcatttgagtgtcctctcttttctacaaagatgtgtcctgcgttgtctacagtgccctccaaccctcagtttttcagttcccactgcctaatgtctgcccaagcatagataacaggaggtggtagcagtagcaatggccttatcagctgttcacttacatgttttgcccaagtcaccgttgcccatgtgtcagaggagttgccctactcaacctacactgccctagctttcccacaccccttgaatagataggtattcccaaagctgcttgttcttctagccagttgagctttgatcctctggacttttagtcaaaagtaggttttggtcagcaaagcatggtggctcttccagtgggaccacgtaacaatgtctgctccactatatatgtgtgggagactctggtgctcacggagacaggtggaaaattgcccctggggacaccaggcacagggcggcttgtaagggataggccttgaatgccagcctgcctccacctccacactacttccttcaagccaaaccaatagcctttttgtgtgaaacatctttgaggtgggaaagggaccactggagctttgctagcaataactgactttcagtgtaatgttctgaaggcgcggggactcagcacagaattcactttaaatggagctgaaggagtggccctcctctatgggaaaagaaaatagttttattcttcattctggctttctagctgtttgacttcagttagtttgagtgagagtaataggtttttctacatggactcagagggtaagagcattgctctcatcattgtgatgtgtggtatgtgttctcctctcccccttgcatgtcacagccattgcgctccctgtgggcctcatggacttggtcttgttagttctaatgatagccagacttcgaagagacaaggcaaccaggcagccagttcaccagtaaatgtggtaacacccacttaaaaatgtgttttctcctcaaggacggtttatgaagttgatcataaaagttctattacttcatcctaaattaaactgagaacaagatgtgttcttctaatcagaaactgcattaataaggaaagagtggtatagaaaagattttctttccttttttcttaatgtatatagtttaactcttttctttgttccgtttaagctatgctcataggtatcagtctgttttggactagtattaaagatggaaataaaacaattcgaactaaaaaaaaaaaaaagatcactaagagaaacttcccaactgctattcttgatactcatgagtaaccgttttagagtataaaactggagcaaaaaggttgccaaccatcaacccttaacctgatggtgattgtcatcttagccaagctctttaccaggctgagtcccacatctaaacctttggggtagcagttgactgccttcaatgagaaagggatgaagaaggaacttggccaggcactgtgaccatgactgtaactccagtactcaggaggctgagtcagggagactggttcaaagttagctttggctgcatatataagcttggaggtattgtttatttatacattttaattgagactttaacattactagaacatatatattcagaaaggaaacgtggcttgttttttttgtttgtttgtttttgcttgagtgtatgtctgtgcactccatgcacatggtgccttcagaggccagaagagggcgctgtgtcctattggactggagttaccgagggttgtgaatctccatgtgggtcctgggactcttgaacccaggacctttagaaaagcagccagcaatcctaattactgaaccatccttccaacgccaagcatttgggttctgttctgttttgttttgtttaagaagtatttatgtattttatgtatatgagtgtactgtagcatcttcaaacacaccagaagagggcataggatcccactacagatggttgtgagccaccatgtggttgctgggaattgaattcaggacctctggaagtacagtcagtgtgtttaaccactgagccatctctccagccctgcatttgtttctttatcttaagaaattgctttaaaatcaggtatggcccccttggcctgttttcttaatctggacattcgatttgtgttatcctcatgtagtgagtgactccatcaaatacagtagggacagcagagtcttgattggaagttctagctctctgtcagttaccgggatcagtggcgcctgccggtattcagtgggaaatgccacagcaagctcttggagttatagacggcaccatcctgagtagtacagtgaacccctgaacctcccgtgctttcactcttgcatcccacccgaggtgaattatctctgtctggcatagcttcacactgtgagcctacccacctgtttgtcactcagaggctctgttgggtccgatctagtgtggcaatgtgatagctaaccattgctttaattgataagaaccccaagacatgagagtggtcaagctggtaatttggatctagcagagaagcccaaagagaaactctaaatggcttcctttgtgtgaaaaagtgcagttatacgtgtgcctgtataccgcggtctacataccatggtctgatacccatggtctagatgtaattagtataatctggcttccagaaccggtcaggggtcttggaatatactcttgtcccagaataatgagtgctgctacatgcagaatgataactaaaaatacatattacttgttctaagggatagggagtaaggggcaggttagagagccctacacggagggcaggggtcttgctgcttttaagaatgcgctctttgacacacgtggaagaaacctgtgtatgttttcagtagtcgccacacgggggcagcctactcaagcaaattcaagaacaactgacttgcctcgccctgcctctccctctctcatagactcaaaccttgtgcttgcttagcttggctatgactgagttacagcccctattttgcacgctaagacctagagtttctggtttggaagcagtcgtggaagaggaaaataagccttgcccagtgttggacagctgcggcaggcagagaagatgccttcgatgttttcacagctggccggagactttggctggttgtatccgtattttttgaaaaacaaagacattttttaaaagtccttttttattatgaaagtaaatcacctagaggcttctgtggagtgaagctcaacccgactctgagaggattccaaagcagtggtttttctggagaatatggagacggtgaacgttccgttttctgcatatctcagaagcttctgttcagtaattgctatgcattttcctccttattccttcacgtgacggcagaatcgtggagaatcagaaacacttgattttagcccagaggccgcatgtgtgtgagtgcgtgtgtgtgcgcgcgcgcgcgtgtgtacgcatgcgtgtgtgtgtgtgtgtgtgtgtgtgtgtgcctgtgtgtgcgtgcgtgcgtgtgtgtgtgtgtgtgtgtgtgtgtgtgtgtgtgtgtatgggtgggtgtgtgtacagacaagagtacaaccttaggtgttatcctcacaagccatctgccctatgagacagtgtccatcactgacctggaattcaccagataatctgttctggctgatcattgagctcctggggagtctgtccgtctccacctcctccatgtgggatacaagcacgcatgcaccaccttaccaggctcaagtactcaaacttatgagcctatgggagcccttctcattcacatcaccacagaggccttcaatagagctaagcagaagccagcaccaagctcttgaacctgaaaaactagaaaccaactcaaccaatctccagtctcgggtgtttcgttacagtaacagtaaatgaactggagaatgaaactgaaaggtaatgccctgcatccgctccacgctttcaggtgcattgagcattgcacagatcagagcaaggggggggggggtcagctgaatgctgtccacgctgcttgtgtgctaatgagtgtagacccaggtcttggccatatgcattttagtcaggccaaggggctcccttcaccccagccccgccttttctcacttttctccacacaagtgtatcttcccaggtcccttggcagcagagggacagatcagacagacaaggcatgtgtgtttacatgtgtgttgcatgtgtgtaatcctattgttgggaatttgactggtcccctcttccccactgagggtctcaccttggtccccaacgccatccagagcaagagatgcttctgcctgggtgcttatgtgcaagcggaccccggtgcttggaagagagaaattgttgggcactgcagactctgctcccttgagagtcacactgaagtcggggacagagaacagctggaagttgcaattggagtcacctccagctgggttgagtccactggatcccagctgcatacggaagaaatggtgtagacgtcagagatgggtttgaatttcatttttctctgggagtctcatttctcttcatttcacagagacacttaaaaacaacaacagtatttatagaaaaaagaaaacatgagtctttcacatttgaagactcaaactcttatgtctgagattttgaacccaaactacattattacatagcttaaatttagcgcacagtatgcctaataaaggggctttaaagtgagcagaaatttctaaatgtattgtggagtgggtggatgtgtgtgtgtgtgtgtgtgtgtgtgtgtgtgtgtgtgtgtgtgtaaggatagggatagatagagctgggaactcccagcctcaagtggactgggtcactgaattttactaactgatcttttcacatgtagggcaacactgtaaacaaatataatcagtatgctgcttgcttttagttgagtggctgctctcactttacttgagtggctggtgacagccatgcactgtcctttgcctagattgtcttcagtgatttcgaggttcatacccttttggacaggactagcatgcccaccataaagaaactgagactcaagagagacttctccagatcgtaacagttaagaacagacacttggggctggcaggatggctcagcaggttaaaagcctgaggacccaggttcggttccccccaccccacactcttctggcccacacagatacctgcatgcatgtggtatttgtgaactcatgcaagcacacctacaggctcataaataagcaaatctttcggggaagagaagctaccatatataccccctctgtgnnnnnnnnnnnnnnnnnnnngagaagctaccatatataccccctctgtgcggtagcatttattccagatgtttctatgagttcaatctctgaacccaaacactgcccaactcagccaccaggacccaagccttgggttgagcttactattttatcattccagctctttttagggggggaggctgggggttgagacagggttctccgtgtagccctggctgtcctagaacttgttttgtagaccagactggcctcaagttcacggagatccacctgcctctacctcccgagtgctgggattaaaggtgtgtgctgccacacccaactcccctccttccaactttgtgattccccagagacaatcttgtaacatacgcagtctgaagtagcctgaaggtaactccttcccccaggctttgggcttgccagagctctcaggctctctctattaggaatcagtggtatgtgccctctgaaggggtagagatggcacctcgtcaggggtgctgacgtggtgccggtgatgtgcaggacgggggccatataacttcatgctaagtgaacatccggtttctcaggagcatgcgtggacccctgggatggtggccactaagctgtgtttagcgaagtgcattcagatgttggcatccatacttttcacggcgatggcggcctggtcacgtgacttgtcaacaccaaagaaggagctgattggacttcttaagccaatatatcagcctgtgttgggaaggggatttgtgagagcacattgaagcgagtaagcgtgggctcaagtggaaccctgtaaattaggtttgatcagctttggctgggtcagaatgtgagccgagactctgaaatgcaggcaggattgccacattgacctcatgaggaatctgtggggcaggacccgctttacagtcaccccctactcaaatgcccaccctacatcctataggtaacttattctgacttcagtcttggtgggtggtgccgcagaggctcgaacatggaatgccttcttctcagacgtagagttagaaatgtcggcataacggttcgctggcttcggaatacagtttaacaaatcaggagtggaattgtgttgctagcggttgtctcgttctccgtgggaaacctggatcaggaccgagatgtttctccaggccgtggttttggttcagctttcagacagcccgtgtcactttgcagccacctgtgtcacaccccgtgtcatcagagtgcactgtggaagtggggcatacacagcactgcagagccccactgcatcagtcctgcagggctctgagcctgtgatctgcagaaaacagcctgggtgtgtcaccttcagtctactggcacatgggttgtatttccctcatccacaaagcgagtggtttctgaggacaaaataagaaatctaatggcacactcttgtctgtttgtatggagagtccatgtcctagtcttttctgtatgcatgtaagtcactagaaaccagagcctggagcctgaccattgctggtaaagcagggtctaggcccaagtccaggtgatgtgactccacctgccctgagtctggattcctcacctctcaggggaagcagctaaggcccagagagctcctccaagagagcagatgcagaaatgtgatctgcagatgtgcagtgggagactgggaactagaaagtgtaaatgtagaggctcattccccacagccccggccatgtacatgtgcctcgtgtgtgcacgaagactgtggtccatgtaccaggccatgtacatgtgcctcgtgtgtgcacgaagactgtgtggtccatgtaccaagccatgtacgtgtgcctcctgtgtgcatgaagactgtgtggtccatgtaccaggccatgtacgtgtgccttgagtgtgcacaaagactgtgtggtccgcatgaaggtgcatctgaggcccaccctgctctgaagagccttcaccacaacacactccctcttcctcccctatcttcccctctccctccctccccttctccctccccctcttcttcttcctctctccctctctctctctccctctctctcttccccttttccctctcccttcccccctccatccttccttgtccctctacccttccctctcccttttcctctccctctcaccttcctttacctctcaccctccctcttccccttttccctctctctcaccctccctctcccagtctctctctttccccacccttccctcctctttctactccccctttcccttctctacacgacattttttttttcctcaagagttgaagaaaataatcatttttatgatctctgaaagcatatctattactgaatttgtgacccgttttccttcttggtttacatcatctcgcctgacttttatggtggtggtggtggtagtgtgtgttcctgtgtgtgtgttcgtgtgtgtgtgtgtgtgtgtgtgtgtgtgtgtgtgtgtgtgtgtttagattcattcttatgtttcccaggctggccccaaacttgctttatagcagcagttctcgacctatgggttatgacacccttgaggttcaaatgacgctttcacggaagccatctaagaccatctgcatatcagatacttatgattcataacagtagaattacagttatgactaacaatgaaagtaattttatggttgggggtcaccacaccataaggaactctattaaggggccacagcattcgaagggttgagaaccacagctctatagcgaagggtgaacttaagcatctggtcctcctgcctttacatcccaagtttagggttggagatgtgtgctactatgcctgattttatggaacgtgggttccctgtatgcaggacaagcgcaatagcaactgacctacatccccagccctgtcttaacttttggatatatgacattcacttcggaagagagtaattgtcttttctagcatttttgcacataactgaatagcctagatatgtaataaaaccatgaagtaagagttgaatttgggaacgcttaggaaaaggaaggtcatttcttatccttcgggagatgttgctagatatgtcataattccccgttgtccgtttggctcacagtcattctgctttatgcaataagtcttaagatttttaaaagccagtagtgtgttttactgatcacaagagagagtagacaactgaaataaactcaattcctgaaaggaagaaaattcctgcacagtgagatcactgggtgggcatggagcggacaaatagcttctgctcgctcagtttccatcctctgtcctgccgaagcctgaccctgaacggaacctcttgcacactgacaccctgacatctgaacggaacctcttgcacactgacaccctgacatctgaacggaacctcttgcacactgacaccctgacatctgaatggaacctcttgcacactgacaccctgacactttaagtcgtttcagctcacttcaggatccttgttttactagtgcaggaaacatggtcgctgactcactgactgacgtagggcatagccttttggtgtttgatcagcctgcttcaggtgagatcaggcacgttcagggtggaatggtgctggactcagctaatttcagatgttaggcattctaagtttaaagttttgtgaatagtcagggactctgctaatgaactctccatatgtagcctgcgagtgagaagtgtgccagtgtggttgccatggtaaaattacccatcagttcctagttgccaagaatgtatttttggcttctagtctgtgtgactactagggatggtacacacctcggccacgcccctttctcttaccctgcaaggccacacccctccttcataactccatcctgcaccacaccctctacattttcccatccttagctcctctcttactaattagcatcagtgacccccaaagatcagccttctagttctgcctttgctctgtgtggaggtgactcccacgtttccctccgttccctggagaatctcagtcccctcagatgtctcagtgtcacctgattctacttccctccttctgcccatcctaatcctgcctcctgagaaatctccctgagacccatctcatacactgtatacctgtccgaccagtttctgttacattttctatgcaacaatgaaacattttagaattacaccttaagtggaaaagaagcgagtttcgatactttgaaatccctggcttgctgctctttgagaatagggcacaataagtgagtattcatagaaatttcaaaattgttgttttaaagcatgagagttgacaaggaggctcaggtcacaggtctcaaagcaacaacaacaaattttttgtctcttgctgttatcttctctgtcctgaggagatggagcaaatgaattgtccatcagcaggtgaatgagtaatgaaaatctggtgtacactcacacacacacacacacacacacacacacaaggatgggggagggtgatttcatttctagattcaaagaaaaatgaaatcacaaaatttgcaggaaaattttggatggatttagaatatataaagctaactgaggtcatccaatttcagaaagaaaccctacatttcctcgcatgtgaatcctagcctatagtgtatacatgtatatgtaatgtatacatgtatatgtgtatataatatatacatgtatatgtgtatgtaatgtatacatgtatatgtaatgtatacacgtatatgtatatgtaatatatacatgtatatgtaatgtatacatgtatatgtgtaaacaaatgtatgaggaggtactgtaacgcttagaaaggagaagaagaaagggtaactaaaaaaaagaaagaaatgcatactagtgaattcacggatataatatacgttgtgtatccaaatccctgtctgttgttgagaaggcaatagcaattttggaaatattaatgttttctaaaataaaagtgacactttaaaaaaacaaaaaacaaatttggagttcttttcaggatagtgctaagaggtaaggagggcgtgcccataccacagtgtgcggcaggaatgctgtggtcactgcttgtctccttacaatggagagtctaaagtggatccttacaggatacgatcaagtcagaggccatatacatttggctggccctccctgtccccttggtgtgtgtgacagttgctggctgccacaggtgctgactggacaccaatgcctgtccaaacattaaatagtggtaggtcttacattgcaaatgccaagtggaaagaagtctctgttgaacacctgtgtttcctcccgtctcagtggtttgccctacgtccccagcctgaagaccccagctctgccctgggcactcaggggcaggttcttaccttcatgctaccttaaaaaatgaaataagacgattttcaatgaagatttctaagtcccatttagtcacactattcgtataatttgaaaagtatgtttttgttggggaaagcggttatcttttaaaatagcggtcttcattggaacttttatattcttccccgccccccttgctttttcgagacagggtttctttgtgtagccctggctgtcctggaactcactctgtagaccaggctggccttgaactcagaaatctgcctgcctctgcctcctaagtgctgggattaaaggcgtgcgccaccaccgcccagcaaactttgatattcttaattacactggtaacattcaagtgatgtagaaggatatttcataactctcaggtactaaaaggcacaattcttcttaaaaaaaaaactttcaacttaaaaaattacactcctatttgcttattggtggtgccatggttgggggatgggggtaggaggaagtggcacacatgccccagcatgcatgtggaggtcagaaaacatcgtactggagtcagttctctcctaacatcatgtgggcaccaggaattgcacgcagacttcaggcttgctggcaggaggggctacccattgagccatcttgtcagcccatcagctgtttggggcttttgttgttgtttggggttggggggctttgttttgttttgttgcagggagggctaggggagggggcagcttgtttagttttatttgttctcaccttaatctatcaaacccaagacccacatttattctccttcaaaacacattgctagaaagacctgatgcgtcccttctagcccaatgatggcgctgtggttgctgtggtcccctgcctttaaatgtattacgtctgctaaagagagtgaccaaaccctcatggaaccttccagatcacatctgccttcttccctccttatttgatgcccctccccacagggatcacaggaatagtttccgtgttacctaaaccacacggcacccacatgctccccgttcatgtccgtctatctgtgtcttgctattgttttaacatttggtcctctgcctggggagtgggtggttctctaagctacaccacttcagtctccacagagaaagcaatattttgttatgaggtaaagtttcaagccaggccctggccaggacctttcccatgtggggagatggaagagacagccagggagacggtaattctccttgagtctgagctcattaaaaccttacccgtcctcagtgggttatttattggtctaagcatctagcactttttctttccagaaacaattagcatctatgctgtgattgtggctaggggtgggggtggctttgtcccatctgtgcgggcattaactgccccctggttgcttattggcacagctgctttagagatgtatatagatgtatatatgtagatgtatatagatgtatatatgtagatgtatatagatgtttatatgtagatgtatatagatgtatatatgtagatgtatatagatgtatatatgtagatgtatatagatgtatatatgtagctgaggagctggaataagattcccaagatttatgggtaatgaagagaacgggttatatcaaagacaccacgtgtaggaatcagggggctttagggggctggtatgaagctatgatccctggcttctcccaaaatgaacacttcactgtgcttctacacatcctttcaataggtgttttaacatattctggtcttgcagtcttttggcaagaacgcctagcaaaatgatgtttcttatctgctgctctggagccaggcttaaacgtttgcattgcctttgagaatcactgtggttgaatttatgacagtcatttaagtatgtaaatgagaaatggcttttcagaacagatgtttacaatcgtctttccagcagaacacttcccctacacataacatcaccagcaagtctagctgcttctcagatctgtctgcagggatcatgcacagcttgaaccagtcagactgctggggctgctggctccacgggccttggtgctgtttaactgtgtcatggctgtgtagcctggaggaggaagaatggctagttaggcaattgtttcagcagagatatctcttttattctttctttttaagtttttctcactttcttcctcttccactccctccctcccttggtgagcatgcatgtgtgggtatgtgagtgtgggtgtgtcactagagtgtgttgcatgctcatctgagtgtgaatgaagccacagaaagcatgtgaaggtcagaggctcagttttccccttgtttgacatagaatctctttggtcgtttgccagtgcatgccccagtctcgctcacccactaggttctggggacctcgccctgtctccaccaccttactcctcattggtgcgcttgggtcacagccacattagcagggccagttatgtgtgagttgggggatttgatgttgggtcccaggtttgcattacaagttctttactgactgagcttttctcccaatcctcttttcttctgaacatagataatccatagaggaacaattcattaaaatgatgcatatgtagcctatacactgaggtggctaccgtgatgatatttttaaagctccgttttctttgtaagacacgttagtcatgttctgcttatcctaagatatgcttgagggctggagagatggctcagcggtaaagagcactgactgctcttccaaaggtcctgagttcaattcccagcaaccacatggtggctcacaaccatctgtaatgagatctgatgccctcttctggtgtgtctgaagacagcttcagtgtacataaaataaataaatcttttttttttctttaaaaaaaaaaaaagaagatacaagcctgagtagaattggtccacaattttagttcatgtccacagtttggaatgaagctcagggtcttttattaaaattgtctgttacagccgggcagtggtggcacatgcctttaatcccagcacttgggaggcagaggcaggtggatttctgagttcgaggccagcctgatctacaaagtgagttccaggacagccagggctacacagagaaaccctgtctcaaaaaaaaaaaaaaaaaaaaaaaatgtctgttactttggcatcatcggacatctgaagttactcctgtctttctgctatagattaatgtgtgtgatttttctctcttttatgccttttagcttcgagaggcagacattgtggtcttaggctcacctaagccagaagagattcctgctgtgtggattccatcaggaaccaccattctcaattgcttccatgacttcttgtcaggtagatgtcttcaccttgatggggcaggacagtgactaaggcaggtcagatgacggaccttgcttctttgggagaccacattcttgagatgctggctgctataggcatgaggacaagagactggattgttggtgtgcctacctttggggcagaggttctcaacctgtggatcacgactcctttgggagtcctatgacactttttgaatctcagatatcttgcatatcaaatatttacattgggattcacaacagtagcaaatttacaattacaaagtagcagtgaaagtcattttatggttgggggatcactacaacagggggaactgtattaaagggttatagcgttaggaaggttgagaaccactcctttggagttttttgataccaggttcatattatgagcagagagaaaccaagaagtcagtgaggtgtctgccccaaatgcctctggtgacctctggtactgacagacatgacaactgggaccttaaggacacgcgtgaggtagactagaaatggtgttctttatactctaaagcacggtggagtcttttcttgtagagtattcttggcaacagctccttgggaaagggttggaggaaatggagctgccaggaggactagcatggtgataaacggtgtgttctcagagctctcctcacagggtcccatgaaacattctacctttaaaagcacagagagcaatggagagggtagaggcacaggagagagacagccatgtgtgtaggagcccctcagtttcttcaaaacacactcctgtggcgcaagggcactcgccaccaagcctggtgacctgaaagcagtcccaaggccctacttgtagaaaaaagaatcacacctccacacacacaaaccacagccatggtgcacgaacacataccacacacacacatactaaatacataaatgtaatttgtttgtttgttttttgttttttcgagacagggtttctctgtgtagccctggctgtcctggaactcactttgtagaccaggcaggccttgaactcagaaatccccctgcctctgcctcccaagtgctgggattaaaagcgtgtgccaccacgcctggctataaatgtaatttttaaaattaaaagttaaaagaataaaatgcatggtttgcaagactggggggttgtagctctgtggtagatggcttgcctgacaagcatgaaactctgagtcccatcccttgtaccccaaaaacaaaagcccataaaacacacatcctattacctgcagacatgcatacagcttttatttgtcccctaggaaagcagtctctagcctataaatcatgacagaggctgattgggctcagagtccgagttagatgaagaacttggttataataccctccttctcaaagattttacattttctgcaagattatttacctgctgagttttgttagtgtttatattgagaacagtttggacacaattgtagctggagacagaaatctacttcaatattcttttggactatctttaagctctgtaaaaaaaatgatatattttgtgtcatgaaaactctttatttttaatgtttcttttagagctcttggtcttgataatgctttttctaaagatattacatttttaatcccagcactcaggagacagagacaggtggatctcatacttgtaggcatgactggtctgtgtgccaagccaaaggccacccaagaactatatagtaagaccctgtttcaaaccaaacaaatgaatgatgatgatgataataataataaataacattagattttgttggagagttggcatgaggttaattataaaattctctaagaataaacattaaatattttattaaaaaaacattagttttcaatgtttcagtactaggaaggacataaaagactagaagccttctacattgatttaattttctataagtagaatatttgcagctagtttctttttagtttgtctggtccctttgtaattgtttccttgttggttttggaatgtcacgtgaacaagacagcacttggccccgtagtgaacacacagtggaggctgagcagtgaccatgagcaggtaaagccacgtaaaactaatggatggattgtttggagtcatttttaaaaagttcttttgtttgagcgctaggccagaattttgaatacactgtggttgggtgaaggtgagcgtctttaatgaggttttcatcctcattgttatcattgcagacccccctccaagtccccacatagacaggatctgggggttatggtgcggtaactctgcagaggcatcgatacctaattgatacctacccctaggagagctttttcctgatgcctgatgctggtgacattgtgttcagaaaccagacctgacaatcaggtctttcattccactgtccaatgaactgagtatgtgaaatttagacacagaaattctacgttcttattcaggctataaaatcaactactttatttattacttaaaactatttttaaaagaagaaatgctgtgatcttgaagcactttgactgtgaaaaaaccgactttgccctaagtatggccattttgtatgccatgttggaagatgtaggaacctgtgtactgattgggatggagaagctggtctttaattttgggcccagagagcatcaaacagcagcatctttgggtttcagtgttatttgcagagtctcctcttgctgagaaaggagtatctagtgtggagtgagagaagccatgagctgtctccagggctcggtaagaaaccgggtgatccagaggaaccaagagtttttttcccttctgtggccctgaagggtgacagtttgatgtacaggaaaggaaagggcatatatggatttaaggttatgccactcaaagcaaagacaatcattttgttggttgtgaggttttattttgtttttaagacagagtctcattgtttagccgaggtctgctttgaactctcaatcctcctgcatcagcttccagaggctgagggtataaggatataccactaccaaaccagacttagtggtttggatcttttgttaagatttatttgtttttcttttatttgtgtgtgtgtgtgtgtgtgtgtgtgtgtgtgtgtgtgtgtgtgtgtgtgtnnnnnnnnnnnnnnnnnnnnnnnnnnnnnnntgaagtgtgagactttagatatccctggagccagagccacaggtggttgtgagttattgtgagttctgggtgtcatcaaaacccggtcttctgccagagtaatacatgttcttgacttctgagttccacctgcccaccacctccataccctgatttttttttttaactcttatttatactgaccctctaggctgtgtggctttgaggaaatcacttcaactttccactcctcatagataaatagaactgagaaactcagctgggaaggacaaaaggcgtggtgatttgggggcagtgactttagcatactagctaccagtgaatgttggttcacgctctgcacccctccctctctaccatattgccagcacacacaggccgtgacttcacagctgcagaatgtatgcatgttcttagaagttatgtccagggaagtaagcagggtgggagattctaaaatactgtggtggcagcttctgagaaattgggcagagtcaggcaggcttcagtcaccctgtgtgtttggaatgagatgaggatgcaggcttctgacccttgagctttattctgagacccatgtctgtattagctggctctcctcttctcctaggtctgtccctgaggtatctcaccaattttctagttcaaatttcaatttgttctcagtacatctatttacttttaagggatggggacgtagctcagtttgtagagctcttaccaagcacacgtaggagcctgggttcgatcctcaccttggcataaaatctgatgtgatgcacacccagaatcccagcactgggtggtggaagctgaggaccagaagtttaagatcagccttaaatacataatgtccttctccaaacaaaacaaaacaaaaaacaaaaatgaaataaacaaaaacaaaaccattcaggttatgcatgtagtgtattgattcctccttagtttgtttggtcttagaggttgcaaagttatataggataattgtaatgtttacattattttcatttcttcagagctttctctttaaagagtgtgagttgtatgctctgatgtgatgggattcacatggtgggaatgatggtggccactctcaagggcactgtctcaaaatggggctagagggtttcttcagaggcaactttgggtatttgttgcgtgtatttagggtcagggccggttctctgcagaaggagaggatttgacctggtcacaggcttctgttatgttagccctggggttaaggcgccctccactcaggcctctcatcctttcactgatccctgctgctttcttcaaaaattcctcccgatttctggtcccatcacgccattgtagtcttgtctggattcatttctcttcatttagctgtccggagacaggaaggaagagagggaagnnnnnnnnnnnnnnnnnnnnnnnnnnnnnnnnnnnnnnnnnnnnnnnnnnnnnnnnnnnnnnnnnnnnnnnnnnnnnnnnnnnnnnnnnnnnnnnnnnnnnnnnnnnnnnnnnnnnnnnnnnnnnnnnnnnnnnntcatacctgtttttcacagtgttcctcgtaccttgaagtcatcaacgggttggtttaagcataccaacacttttcctaaccacatcacagtctctctttccctgagccctgtgttgtgcaagatcctaaaatgataaaaatcctttactgtgcaactgtgtcccttatgttctgggaccatgcacttacagattgatagcagtccccggaatgtcgctgtcttaattccccattgctaaaaggcaggagaacgaacagtacctgtttttcttcttcttcttctccgcagtagttggacaggattttaagaacaggtctctagtggttaaaggaaagcaaaacaaatctctcccatcttctgactcttctgcccagatgtgagttatagagctgaaatattgctaatctttaaactatagatgggggatgtggtttttttcctacaccctgattgcatgtgacaacagaacattacagagcacatactcttaagtgttttgtgcaatttcttgtaaagaactgtcagcatagtggataatttaggagtcaagtggtcccgaaacccaagaaaatggtttcttaattaaaaaatgttgctattaggagtatttattttcccattaagagatgatacaggccaaagcattttacatgtgtgttttcttttaataaatgttataattgttaactaaaggagggaaaagtaaaattcttattgatgcttcccaaatttgaaaaacagatgtatttgtcagctttctgcccctgtgaaaaatgactggtaaggaagaaagtctatttggttcatggtttctaagagtttatgccatgtagctttagccctgtggtggcacactacatcctggctggaatggggacaaggaaaccaacagaaactggaagggcctggtgtcccagtgtctccttcaaggccatgaccccagcaacctcgcttcctcccactaggtcccaccttcttaaaatgccaacacattcattttaccagagccacaggctgatgaaccagcccagaccccagacctgaaacagcatcacgtaatccctaagattaatatcctaaagcataattgcttttgatagaaattaggccgtatttctgacaggaattttcttttgataattcaagcaaacaaacaaacaaaacaagcaatctatggactggggctatatctcattggataaaatgcttgccacaaaagcatacaggccagaattcagatctccatcacccacatgaaagccaggcgggcacagcaggcacctgtaatcccagcgctctggaggcaggacgctagccccgcagaacgagtagctctagcatcagcaatgcgccctgcctccacaacagagagtgaccaaggaagacactcggtgtcaaccaagctcacgtgtgcttgaacacgcacactcgcatacccacatgtggacacatatgcacacacacactcttgcacacacatgtgaatacatatacatgcacactgaaaaaaaaacccacagttacgattggtatagtggcttacacctataatctcagaaattgggaagtagaggaaagcagatctctgtgaatttgaggccagcctgttctgcatagtgagttcaaggtcagccagggctacatactgagtccctgtctcaaaacaaaacaaaaaatccacagttattactttgaaaacatgaatataatatatatatagtatatatatatatatatatatatatatatatatattatgtatgtatatttttatataatgtcttcttcctctgtcattgtttgataaagaattcactacatttgatttcatttaattgaatatattttacacatattatataaagttattgttattgttgttgttttatgaccaaaggaagcttgctctcttcacagctttagggtttatcctgtagttgtttttacttctgtgtgtgccgtgtgcttgcaaacaacttcacttctgctattgctttacggcgatactgtaagggttctaggttctgaagccccactgtgtccgaaattcaaatgttgggtagcacatatgtctggtagttaaaatgaatatcctgtatggtacacctcgtggaccctgctacatttcagttcacacaatcctggccagttgattttattcttcgtaactaacaacccaagcggggctgggtcagaggtagagatgtgagtctgtataggccatgctgcctctacagtgaatatcatggatgtctttgggtgtgggagtggcagaggtgcggggccttgaacccagggcctcaagcaagccaaacaagcactctgtcactaagctgtatctccattcctcttacttttaaaattttgagacagagttggactctcttcctcaggctggccctgaacctgcagtgcccctgctttggcctcctgagtaactaagatgacagactaccagaccaaactagaattgtctaaagccaccattatcttaatatctctctattcattcttgtgtatgtttttgagacagggtcatactgtggagcctagactttgtggtgtagtctaagatagtttcaagctgtctattttcctgcctcagtttttcaagtgttgggtttagaggctgggctgcctcatccagctaattgtatctttgcttttgtaggtcacagtgtcacacttggggtacttgacgaacccatgcctggatgtttttgtgtccttcagtgtgtgatatctgtcaagcatagtgtgcctccgtttatccccaggttaacagcttagagggacattgacatccctctaatataaaaatacaaaatagccccagctgagagtcgcaaggctgtgccagaggtgacttgcctatagacattgatttcctgacctcccgactaacttttttggtgataactgatggacaccgtgattccgtgtgtgggatttttacagagggcaattgtttattactgaaaatatgttataagcctttttccattcaatgtgtttgcagggaagctgagcggaggttctcctggggtccccgtggacaaactcattgcagaagagagcgtgagtctccttgctgcggctctgcgcattcaggttcgttggacgcagccatttgagtttgggcttagtagtagttgctaatgttttccaagtgttttctgcctgtcgggtggagttttagacactgcacatctggggtcaaagagccttctgatgggaggaaatgggtacttacttgctttttacttgcctaccatcgcatgatgtgtgcatggcagatgcccaaagtcgtgtctgtggaatgcattacctctcaaatggaccaacacaaaaacttgaagcatgtattgacagagacctgggagctggctagcttcaagcctttcaagtggttgaaatcaagatgccagacggggcttggtcgagggttgagatgaagaatctatccaagaggctggggagatggttcagtcaatgaagtgcctggtccacaagcacagggcccggactttgatccccagcacccacataaaaaagctgggagcagcggtgtgagcctgtcttctcagcacgggggagacagacaggaggatgtctgagacagtacagttgtaggttcagtgtggaccagagaggtggctcagtggttaagaggctgggctgctcttatagaggatgcagatttgtttgccagatggcagctcacaatcatctgtaactctagttccaggggatccaatgccctcttctgacattccacacacatggtgcatagatgatacatgtagggaaaatgcccaattccccccaaatgcccatataataataatttaacaacaacaacaacaataataataataatgatgacatattataaacatatgttggaaaacattagaagccatccatgttgccagttctgacttttatgtataaacacacaataaatcttttaaagaataaccatatctatagtcttggtatctcttgtgaatagttaagctgttttaacagtgcatgtgtctacaagcccataaacaaagtctataaggctaattgcatgtgtatcacattgttgcttataacctgtgataactgtctgacttgggggttctttggcctctgtaagccccttgcagtcttcctgtagttgatgtgggggccctgtcaccctcacgtctacaccatctctttccccctctctcctgaagaacatggtgagcagcggcaggaggtggctcagagagcagcaacatcgaagatggcgactgcactgcttgaaactgcagcctctctcacctgtgcccaggtaggtgatgctgtgcttggctggtactaatggcggctcaccccagggacacgtatctttggtcagttgctgactggcataacacaaggcttttgagtgtttctttatctgaaacatggtcccaggctgatcttgaggaagccatcggaagcaagccagtgagtagcacccctccatggcctctgcatcagcttctgctccaggttcctgccctgtttgagtccctgtcctgactttctacaatgatggattatgatctggaagtgcaagctgaataaaccctttcctccccaacttgctttttggtcatgggattttgtcacagcaatagaaaacctaactaagacactttagccacgaagatgagataaaacaagattctagaagctaaggggaggtgagaagagaaatagaaaggtctatgatggtgaccttggggggaggggagtgggaattgccttaaaggaagctcagagttcagcctacactggcttgaagcatcactttctcctctcagcttctctcataccctctggagcaggagggatgcagcttctttaccaattatcccctataccaaggtcagactgccctggtcctctgttctgaagagaattatagagttgtattggggctgagcaggatgtcaacagtagcaacagaagagttgcgactgaagagttgccgttagcagtgtgtgtgtgtgtgtgtgtgtgtgtgtgtgtgtgtgttggtggagggtggtttccttccatcctcaaagactgttgtgtctcaagttcaagttcattgccctctctcgtgcaatgttctaggctctaggaataagtgtgtcttcagtcctccctctcaggcagatgttcagtgggttggaagaacaggctggccccaaataagagagacagggcatgttggccacagcagtgttctctgggtggtccacagtacacacattggtgctgagagcccctgtaataacagcaacggtgtactcacctcagtcaagtctgatgcccagccatcctccaaatgaaggtcctgacttttttcagtctgagattgagtttcgagtactgcatcctttcacgagccattacataattaataaaatattctgaactattatttttggactgaaaatgtgaaagggagaaagtatggatggagatgaaacaaaatagcatttccatatttctgaatagccaagagacactttggctagccaggtgagaaagcgtcatgtggtagccgatctagcctctgcctcacagaactgtgtgcccaataatgggtttaccatagccatagtatgaagaacacacttggcctctgcctgtgacatgggtgttaaatttgtgcctgacaccattctagagtcttaatactttaataatattttgtaatactatctcacaaagaaagggagggaagagtcactttctcatgcatcttaattgttagcagttgtgtttaattctgcctgggaagagggaccgcaaagcaattgggttgatttaatggttggcagggtgtgcggatgcttctccctcgagcgccgaccacctaagctgaagcgaccacctccgtcacgcttcttctctctccctccagtgatattgagatttctcgaggacagactccaaaagctgtggatgtccttgccaaggagataggattgcttgcagatgaaattgaaatctatggcaagagcaaagccaaagtccaattgtccctgctggagaggttaaaggatcaaacagatggaaaatacgtcttggttgctgggtaagactctacactgactctaccaaggagacgtgtttctagaactgtcttccacatttatccatatttatctctgtccacacgccccttaagtacattgcgttcttggttttgaccctgttcctttttgcgtcaattgacaagcctctgtttgtcatgaggtaaggctcctcacgccagcagagctgagggaagtaatctctattctgtacatagagtaacaagctgctaagtttgctgttttgcttttgaatttattttttagcttgtgatgctgagactcacacccagagtctggtatacaacaggcaaggaaggtctctaccactgaaccacatcaccaccaaaacaggagtgcggtggcttcttttgatggtgctgggtcaggacgtcatgtatgctaagcaagtgctgtaccactgagctacactctcagctccagtgctttattattcttgccctatatccagtattgctcctcagggttcttccacctgctaccaagtcatgttctgtagctcaggatgcccttgaattcttcatcccccttcctctatcttctacgcgcaggattacaagcatgtgtggccagtcccagctgtcctagacgtttacatttagttttccatgattaaaataacaattagaagcacattattttgaactgtgtaaggacttgaggaacatgtcatttcatattctacttaaaatttaagataattttgggaaatatatattcccttgttaatgtccttggtagttcattgtcatatgtggaccttacaaaacatttcaaactaaggttggccattttccattgtattgatacatgaaaaacaaattgatactttttatgaaaggggaggtttttgttgtttcctttttaaaaacatatttgctacctgaattattcagccaagatatttgaactattctgacattaagttacatatactcttgtgtggtcttgcaattttgtgtgattgactgttgcaaatgatgggtaggtggataagtaggtggatggatggatggatggatggatggatggatggatggatggataggtggaacgatacatgcatgcatgatatttagatagatagatagatagatagatagatagatagatagatagatagatagtatggtgaggcttgaagcacaaaatccatttatcagggagcgacatttctttgctgtggatttgacttctagttaacttagattgacttagttatccacgtgattgctttctgctttcatgttgttggttgttgtcctggtcgagttggttggtttgtttgttttggggtggggaggttgttgttgttggttggttggttttgtttggtttgggggttttgtggggaagtttactttttttgtttgttttttgtcagctagagtcatctgggaagagggaatcctcaactgagaaaatgtccccaccacattggcctgtaggcaagtctttggggcattttcttgatgaataattgatgtggaagggtctagcctcttgcacgtggtaccaactctgagccatgtagtcctagtctgtgtaacaagccagctgagaaagacagtaagcagcatttctccatggtctttggttcacttcctgtcttgaggtcctgccttgagttcctgccctgattcctcagtgatagggtgtgcctgagagctgtaagatgaagtaaccctttcctgccccggttgctttaggattttatcatagcaatagaaagcaaactatgacagttataaaaataatgtagtctcactataagattttaaaaaaaaatactgaacataaataagagaataaaataccacaattttcaccactcagagggaacagttcttcaggtcaggatagtgttcacactgataggcccctccttaaatgaggtcataccatgtgtgttcggtggtacacttctaacagtgagcccatacacattactcttctcatggccctgtggcaagcatcccagtgtttacatctgagttccccaaatgcatgtgatgcatctttctattgcctctagcttcattgttcccccatggtgaacacgtattaatgacggctcacaactactagtatagagtgtctctaattcttctagtgcaggggttctcaacctgtgggctgaggcccctttgggagtcaagcaaccccttcatggggtcacctaagactatcagaaaacatggatatttatattacaattcataacagtagcaaaattacagttatgaagtagcaacaaaaataattttatggttgggggtcaccacaacatgaggaactgtatttatttatttatttattgggtttttttcaagacagggtttctctgtgtagccttggctgtcctggcactcactttgtagaccaggctggccttgaactcagaaatccgcctgcctctgcctcccaagtgctgggattaaaggtgtgcgccgccaccactcagctaatgaggaactgtattaaaaggtcacagctttaggaatgttactaaccactcttctggttatattgagacaggaaaatggcttgacaatgtgacaaggatgctctacaattgacacctctactgatacacatttccactgtttccaagtttgaggtcactataaactgctaaagtggataacactggatatgcctatctgtgcctttgcccccttaggaatattcttcagaaacttctggattctccagaggggaaataagttgtagtcaacttttacagtctcccaggggattagttccaggcagctaaagacatggaaatctgaagttcacgtccctcccataaaatgtcatagtgtttgtatatagtttacatgtaaccttttataaacattaagccacccctagattgcttacagtagttaatacagtataagggctatgcagatatttattaaactctcttgtttagcgaataggacaaagaagtttgtacttgttccatacagattttctttttctttttccaaataatttggtgtagcccctcattgtttgtggctgctttggctgccagcgtttgcactacctgggttcctttctaacctgagagcccagccttcatattcgtacatctgggcatagagatgtcgatcctaccctcaggtaccctggataccctaccattgagaggagtggcaggaaggactcggtcgttccttcctcctgcttctgagtttggagcatcttctactcgtttgcttttaggcaagtgtgcttgatggaggcttgcaatgagtaagcacattattggacactgagatatttaaaagcatcttagagataggaaaggtgacatgtacctgcggtatatacaatcatccgtgatcaaatgctgcgttctattaattgttatgcgccgcgggaggagcagaaatggcagaagcatattgagggccattgcagagttgatagaaattctgttctaatcccagaagtctaatgactgtttttaaatgaaactcaagttagcaactcaaatagcaattttaaaaagcaaacacagggctggagagatggctcagcggtaaagagcactgactgctcttccaaaggtcctgagatcaattcccagcaaccacatggtggtttacaaccatctgtaatgaaatctgatgccttcttctggtgtgtctgaagacagctacagtgtacttagatataataataaatacatctttaaaaaaataataaaaaaagcaaacactctaacacaatacaacctaaagatacaccgacttgatacttatgctaaaaatgaccactgaagtacataacttccctaaagaaacacatacacccctttaaaaatgtgtctctctaatacatggatttgcctccgtcctccagaatttgtatagctttggtgggtttcactgagttttctcgccatggttcagttcaggagactgggggcaggagttggcccacagttctagagcccttgcccagcctgtgtgaggccttgggtttactctccagaaccttcggggtaagatccaaggatctcaggaggaatgtgtcgtctgataataaaggaagattcatgaagcattgtttcctcatgaagtggcagtgatacacttcatctgggacttgtctaatgtagaaataaagcccagctctagacgtggccctgccttgagctaagaacggagttgacatgtctttaaccaaagctatgatgatatcgttatcaagttcccaacgagggagttaaaccattagggcctggcctccagccacatgctagatccagcttcttaagtctggagtcatgtctcaaaatgtggcttaagaaaacaggacaatagtaagggattttcgaatgcgtagccatcagaaattaattcagcataaagcacataatatacctgacatgtctttggcagtgcgcatccttgctccatcgtgtgtcttgaatgtacgacatctgtgctgggcacaccatcacaccacacaacaccagttaaaattcctgaaacacgcgagctcacactttcagctatgtatacagagtttagtcttatgatagaaatgtgctggtttaattactggggaaagtagacttttgatatttaatattttcttcccataattttagcgtataagtaccaagttggtgtatctttagttgtattgtgttagagtgtttgatttttaaagttgctatttgagttgctaacttgagtttcatttaaaaaacaatcattagatttttggattagaacagaatttccactagtttctacaatggccctacataccctgctgccaggtgttttgtatgacatatttatacaaagtaccatgtgatcactgatgattattaaatcaaaatgcctttcaactctgaaacatattaaagatgctttgtgttctgtagtattaaatattcattgactattttatataaaaattggcacatcactttcctttttaataaattgtaaattatatattctaaagaattgagttttaagtttataatttattattaatgtttgaatggcatactcgttttatatacataagattgcacaaaaaagtcttggttgaaagaattcacaacaaaagtagcattaagcagccttgtgttaagccatgcttggtacagtgcacctttagttcactgcttggaatgcagaggtaggcagatctctgagtgagttccaggacagccagggctacacagagaaactctgtctcggacagaaaaagagacagagagacagagacagagagacagagagagactgagagagagacagccagagacagagagagacaggccctgtgccagagactgctgaccagcatggctgctcacaccttcacttcagtccatcctcagtacacattgctctactccacactagccccttgctggcatgactctgtgtagcccaactggagctagcatacatgccatgttgtaaatacaactgcaggctgaactctgagtcctcaagagcagattaagcagcagaagagcaactgttctttttcggaaactatgtcttaagccctctcacttcatacaactgttagagccgcagtgaatggggtcttcctttctcctctattcaaaaccaaaccaaagcacaaaacagcccatgaactgatagtgatgagtgcagagcatcccaggcagaaatctactgcctctagagagccaacaccacactgtattctatatgaataaacaaattcaggagtcaggtgtgctgcatgcctttcatcctagcccttgggagagagatacatagagagtggaagtttagggccagcctgctccacacagccagtcccaggccagccatggctgcatagtgcgatcctgtcttaatgaattaattctccttcagatacaatacacaatgtattcgtcaatgtgttaaatagctttggcagctgactgacattagacctagttataatctaaaatagaaactaaatttgacataaaagtcaccgccctaattttacttttagtcagatgaaaagccagaggaaagtgatattatcaactattacatgcactgttgcagtttttaaatatatatataaatgacccctaaatttagaagagaattatttccccctttttgaaaatctctttttattctgaaaaataatgttgacgtattgcataaatgtagcataaagaaaaatcagaaggcaataacttatctcattactcgggagtgggttttttctcttctattttctctcagtattttacctttttacccatcctgtttacacttaaaggtcgacctataaataatgtttgtgtcctgtcttttccactgaattctataatgtgaatattctcccacactttagaaaattcagatacccagggaaattttcaagaaacctaaattgccatacatcccatactgtacatctcaatctaatgttaatgtgggttaaaaatagcaacactgagatgcaaatatgagagtcaaggttttattttttaaattgttaataactcaaatgcagaacagattcacacacacacacatctatctaaaccatccttcagactgtagtgttcatcttctctgggaatcatctgtctctcatcagatacacatctcgtactgtttacacctacatgtggctgcctctatttgcttcgcctgacaaaattaaaagtcttgggcgcccacggaaatacgccagaagattctgagatgctgaggcactcttgagtttttagtattttcccagttaccttagtgaaaaggaattttgtgtaaggacttgacatgggttgcagctggtggccttttgagtgtatcttgggccctgtagaagattctagagtttccgtgaattcatcagacagagtcgtttttaaaagtccaaactgctctgtgaatttctcactggaggaaaataaagatccattgccaaagttttgttttctttttagagtgccaaatacctgatttaaatgtctttagtgcttcaacctgtgtgttgcaatttagaaataactactgactttgtaagaggttccctttctccctaagtagccatctaagcatctgtgcggggttttgttgttgttgttgttgtcgttgttgtttgtttttcaagttgaactaatggcagaagaggagtcgggtcactaggagaaaccagtaccaacagagcctttgaactcttcccctccgtcagctgtagtgggaagcacaagcaaatgggctgtcacgtttattgtcagatagtaaaggcttttaaaacccttccaaatcataaagatgcctggggtgagtgatatattatatttatagctgtttgcacatgtaactttggagttcatggtcaggctatggctggctggtggtgccctgtttgatactgtttgacaacattcaagattttaattgtgcttcaaatcttcacctcctgtctctgcgtaagaagtccctttgacatttgaataaatgtccttccagttgccacaagagcatcttgataagtctctcctgtcgttcacagtgaacagtacttaaccaaagaaaaggcttcatggtaatgtcagatgctttttgttgttcacgggtgccctaggcaggggacagcgatgcaggaagtgtggccattttcctccccttagcaacgggacatgtcagaattcttattatcatgtcatctggaaggtcataaaaatcacctgataactgttgtagatttggtcaagcaacaagaacttggagccgttgagaagaactcacagttaaattcccatataaaaaagaaccttcacagaggcagaaagaaaactgagcttggaattactccttttaagacaaacttgatgctttgagctcagagctacagatatggggaaagaattaaaccaaattttgatatcaaatacagagatggggcaaataaatttgtgttatagctctccttttattgcttccaataaatacttcctactttgtgattttcctgccttgtgttcattggcagcaaactgagcaatcctgtgtttccaattaagaattggatggatggctgaagtttgaggtcatccctgggcgtgtctccttctgctctgccagcgtatccttgggagagaaaatggaatcccccatgtgacataaggcacagcactggtccctcccttgcagaatctttaggtgcatgcagcatctttgcaggatctttgattctgtgggctcctcaccactttcattcgggttgtatctacaaaagtatgaagttgactcggagtcttgtgtaacagtttccactttgacttcactcaatgctgtgctatttagactgtgacctgggcatttccagcttagttcatcaagtagcatgtaattgggtcatcaaaactctctgccatgtagtggttcacagtggccacctcgtcatcctcctcctgctttagtcctggatgactcttcacctctaaatgtattctgtctttcttagcctccttctgagctatcatgccctgcctccttctccatgtttctgtctttgacttcttttggtctcttctgcctatttccctaaaggaaaacccatccaatggctctagccttacttttgtcattgctgagcgatctctcccctgggggaatcttgtcctttgaactgttgactatagtcacaatttcacagacaagggcatagagagcagaaccttgtcttcagctcgctccgcatttcatctaggcaccatttatctggtggtcatgtcccagcttagatgccaggtctggaggaagctccccttgatgttccagagcatgtgaaaccaaatgctcttaatacggtgcctgtcctgattccccaacttggtgtttatcacagttgctgtaatcactgggttatctctgtctcccatcagttagaagtcctgggagggagacatagagtctgacatgatcgtctttgtgttccaaggtctggcccagtccctgactcaagagagtgctgaataaatatttactataggagtgactgactgatcgagtcaccggggtgttctgagggatctgaaggcatgccttcctcctttgataacagcaccagattttggaggttggaaaactctgtcattagatttgctatggctgagtttcctagacaccctgactcataccatttaactctaaatgtattctgtctttcttagcctccttctgagctatcatgccctgcttccttctccaggtttccgtctttgacttcttttggtctcttctgcctatttccctaaaggaaaactcacccaattgctctagccttacctttgttataagagctgaaccaactctccccgggggagcttgcccttagaactgtgctccttaaccactgagccatccctccagccctggtttcaactttgttaatggctagctttgtgtcactcccaaaaatgaacctcatcaacactgttacctagtaactttccttttggtcatgttgcctttcatttttgtgcctgtgacattagcttgaatgtggtctgtgtgctatacctgggaacactccaagaaaccatggtatcaagtacattgggagaacgctgctcactgcctacaaactcaaatttgaatttgaaatctcagcttggttttactaaggttgtcttgggaagacaattcaattcatccctctccctcctccccaccaaattaggatcacgcccaccccgctcggagaagggaagagtacagtcaccatcggactagtgcaggcgctgaccgctcacctgaaagtcaactccttcgcctgtctgaggcagccttctcagggacccacttttggagtgaaaggtactttccttcacgactaagctagttctcgtggaaaaattaggggaagtaaaaattcaaaatcaatataatgtatagggatggagttaaatgctttgcaaaagagctgggtgttcattcctctacgccccctgaacactcaggacatagcagataccccaagttgaacctccgagtgtgtaaagccatgcagaggttgctgcaaggtgggggcatcttccatggagcccccacctacccaccccggaagctggtcccgtggcttcattactctggcctgctgcctccagcagcgtctcctctatcatccccacctccttcaccaagcgatttgaaacattgcccatcttatcaggatcttatcatctcagcctcttcctgtacacatatgagctcttcaggtctggccccaagttgcagttcgtgggagttgttctgtggggccaaggagctctggagacgaagcaactggctgcgtccagggctgtgaggaaattcctccctggcttagctgaacactaagtctggcacttccctccattactcgcactctgctgatttatcattaagtcactcccggccctcgccacggcaattactgcgtgttcttggcagtttgtggtctttaactgtattttatttatatcgctattacaaatattaataattcctaacccattaaaagtactgattcctcctggtgggccatgccttatagagctgactgaccgtgagacttagtgctgagtggccgaggttttattcgtggctgtgtatctcacttctgcgaagtcgacagccagccttaaagtctatgagccacatctgtaagtgcaaaagggcttctagtaccaggcatatctggctatggtgagacttagttaggataacgtggaaaggacagggtatagtataaaatggtgtctgcttgtgagaaacaagtgtcttcgatatagagtaactaatataatttttgtctgaggtattcatggccgagtgtttttggttttgttgtggttcggtttttttctgttcctgaggattgagcccagcaccttgggcatggtctcactgtgcagaacagcccagcctcaggtttgtagatcctcctgatcttgtctcctgagtgctccaccatctcctgcgtgttctaccaagcctggcaggcagttttgtttttatttcatgtatgacttatatgaaacataaatatcccgatgtataaaagggttttttttttttttttttggtttggttcttttttttttttttttttttttttttgagacaggatttctctgtataacacagccctggctgtcctggactcgctttgtagaccagcgtgacctcaaactcacagagacctgcctgcccctgtctcccaacttttgggattaaaggtgcacaccccacacccagccctttccttttgctttttgttgctgttgctcgtgttgttgttgttaattacatgtatgggaaggctggagttggggtgttagggggcctgtgcagaggtattctagactcctgaagctggagttacaggtagttgtgacccagctggtggaggtgccgggaatcaagctaaggtcctctggaagagagcagttcatgtctccaaccccttcacatatgtgttttatagcactggcatttgctatattgtatttagcctttgggaatgtttttttgtttcttttcggaagtttgtttgtgtggtgctaggaaccgaatataggacttcatgaatactaggccaatgcccttccactcagctatatcccagccctttactcacagttttgaaagcagccttcttgctaagttggcccacgctagcctcgaactcactctgttgcccaataggtcttgaatcaatgatgctcttcaaagcttccgtgtagctgggattggaggcctgctttcttcagaaggcacaggtcttattctttttaaacaaagaaacagaaggcctaaaatggcatctctggaaacagtgccctggttttgttttatttctgttccgggtgaacagaatctctgggcctgagcaggcctccttgttgagtgtgagtagcatccttaggtctgcatctgtcctgtaactgaacttggggactcactaaactgtacttgctgtgttctctaggaggagctgcaggaggtggatatgctcaggtcatccccatggaggaggtaaggtcatgagatgcccagcaggacacctgacactggtggctacgtacaacacctatgtgtgtgccacttggtgtgaagattcatgtcccattcatatgcatctgttttcctgtagcaaatgggtgctaacctagtccctttataaagtgtgtgtgtgtgtgtgtgtgtgtgcgcgcgcgcataagcatgctcacacacataccaatcattctgcctttctaaattccataacagtttcatgttcccaggcttctgtggactcaagcccattttagataagacagtgaatgttgtcccgggtcccatcagtcatctcttagactaccaagatcagaaagtgatgcatggttgattctacccagcgaggccacaataaaatcatctcagagaaactgggcagtaagaatggatggcactgattcttctttctccacgaactctcttcatctcccctgcctcccgtgcctgcccaggcctcctttccctcagccttgctctttgcatcagccgcatgggtcagttccgagttcctcctaggctctggtctgagcaagaccctgtccttcctgctacctgtctctcaggcatagcaggtcttgcttcctgctccatattctctctgtcctgttttctcttctgtgtggctacctgtgagcggaaatgagtggaattttggagtaaagcagaatcttgggcagggtagtgaggacgaggaagggcagagaattccgtgcatgggaaaagtctagtcaagaggaatcagggagccagttcagctcgacataatgggcttgcttagtgctaaggttaaagatgtgaaacccatcagaacttttccttggaggtttgcaggggccagtaagatggtttgaccactaaaggcacaggccagccaagcccagaacccaagtaaaggtgaaaggagaaaatcaatttcgtgaggttgttctctgactgtcacacgcatgctgtgacatgctcacttcctctctccgccatatacacattatacatacacgttaataagtaaaacctgaatgacttcattttaaaacttaaagcttccaaatgataggatatgtcaattctataaataataaatgtgtgttaatacacagctagatttcagtagtgtttgctcttgttccatttttactgtttaagccttgtttccttcccttgtttgctatagtacagttttccaaatttaaataaataattgataatgaagaaatcatgagaaagaaacttttaggcccatcagaatgtgtcatctttacccagaggttggaagaactcaactcttgagttctttatctattggcaagttggaggccctgaccttgattttctgatgtaggccatcttgtctcagctcatgataaagacagataattagcatactgttttattaattcaggcagttcctgaaaatgtccctggctgtatgatgcaaatagaaaggtgtgacatttgatttctagttcaaccttcacctgactggggacatccatgccatcactgccgctaataacttgctggccgcagccatcgacacgagaattttacatgagagcactcaaacagacaaggtgagcgggtcccttgttagccatctctgggttttatcctggagtccctgcatccttaaggactccgtgagagactcttagatcccatctgctctctaaaatcgcattcagaatttgctgagttttacccatatcctcacttccaggggagaagaattagactttagtcagattctctgttgggtctatgactgttgcagaacactgggagagctgtggtatgctggttaggatgttattcgagatgactctcctcagtctcgaagatcatcggcacaagcatttgtttttcctgtagccagaaacactggtccattctaacagaaatggaacttgggtttgtttgtttgtttgtttgtttgtttgtttggggagaggttgggacttccagtagcgagacttgaacctagagatttgtgtgtgctatgcaagagctgtggcggtagacagccagccatctgtaagagtgaactcacatgcagcaagcctgaaccagattctagcttcacatgcatgatatccacctgaaagtgacagacctctgggtgctaactcttcactggcatctgtcatagatgaggggtacttcctcctggtttgtaagaaaggccccgacttcctcaattataatctcctagttcatcttccaaacagaattcgggtaactagttgataagttgttagggtacagatcaagtagacttacacaaagtggtaacgtatatcattaccacatacataatggtaatgtatattatttccactaggatttattaaaatgacagaatttaaatcaaggctgtttatattagccttaaatattaatagaacctgtttggtaataaatttaatgaaggttgtccatctatatgtaatgaacatgtccagttaccaagttcatggctgaacctaaagctctggtgggtgggtggggtttttattttcttaggctctctacaatcgactggttcccttagtgaatggtgtcagagaattttcagaaattcaactttctcggctgaaggtaagatttgactttatagtggtgttttgttttgttttgtttttttcatttttttaagagaatattctagaaccttgacttaatctgggttttcatatgcacccttggttattaacctgtaggtcagggattttcaaccatcctaatgccgcaactcttgaatacagttcctcctgatgtgacccccgactataaaattatttcatttgctagtttataactgtaacttcgccactgtcatgaatagcaatgtaaatatctgctatgcaggatatctgatatgtaacacacacccccccccccatgggtcatgacccacaggttaaaaaccgctgctttagagcataataactcagaatatcagagtgaagtctgtagataaatcccgacaccaaagagccaagaaaacaataacatattttttttaaagatcacacggttgaaaaacatcatttatattttgttctacttattctgtgtgtatgtgtggaggtcagaggacggcttccagaagtcaagtgtctccttcctccaggcgttgaactggagttgttggatttggcagcaagtaccttttcctcctgagccgtattcccaccccaaagaactccctgtttcctcacgtgtgcagtaggagggctgccttgctaacaccctagagcaccctcggtaacagacacatctgtttttatgtagccttttccttctggagagaaatggtttcctgtttgtaaaagttctaaagcagaggttctggatctttgggtctcgacctcttgggcggggggtcacgtatcaggtatcctgtatctctgatatttacactacaattcataacagtagcaaaatttcagtcatgaagcagcaacaaaaataattttatggtgaggggcagaccaccacaacctgaggaagagtgttaaggggtctcggcattagggaagttgagaaccactgctcgaaagactgataaggcagctttgggtcaccctctcgcttgtttggtttttttttatttgtttgcttgcttttttttttttccttccaagtcaattgctactgccctcagttgaaaaagccattttttcttaattcttcccattttgcttcctgatgctattcactaattctgtcccattcatcattgctttcaaaagacaactggggttaaaaaagaaaacaaaacaaaacaaaacacctttatggcataatttatacccattaattggcattaaatatattttaagtactttttaggatattttctttacagaattaaattgattaaaagctttgtgttgttttggcgttaattgattgattgattgattgattgattgattaattgattgatttgaagggtttcatgtagcctgacacacctgcttctgcctcccacatgctgagattgcatgaaaagcacctccttccccaacttaaaaggtttaattaatttttccaagtagaatgtattcttttgaaactaaacatatacttcatttggtatatacgtatgaaacaactgggggagtaacatattcatgatgactggggcaggggcgggtctgagctcagcgtgcagggccatcaataggcaccacaagccacacaccaccaggcccatgtgttcattgcgtgctccccactggaccccattttcagataaggttttagggccttcacagatccccagtaccttctgcttgcagaagacatttgctaatagaatttcacctaagtcccagttcactcgaggccttgtgttcgttctcagggacttcgctagttaaggcgataattttgattgggcctgtcttctgttcttatgacatctctccccaatcactagaaactggggatacataagactgatccaagcacactgaccgaggaggaagtgaggaagttcgcccgcctcaacattgaccccgcaaccatcacgtggcagagaggtaggtactggggcaaccagaaggcatccagagaatgggttggaaccctgtctcttacatgccagtcttcgacactcaaccttccgttcacaaattcaatgaataaaaactacagtcttacagccgcctctcctggcttcagaaccttaccatctggctccattgctcttctttttcaccacctctctgggcacaatcccattccctccatcgtctttcaaatggctgaggacgggctgtggtgggaactcagtgagaaggttcttgatgggcagatgcaaggctaaataccacagagcaacccagccttcgtgcaactgtgtagggagaattctctctcccctcctcttgctgtttttaaggcaagattactccttgtctctgtgagttctcttcccccaagcttggctttcttcctctactttttaaaagagaatattttaaaataatattttatattattccttatttacttgttacattcaggatctcaatggggttgggggtaatggggaggaaagaattggggataaagccatacgttttttctttttctttttttttttttaagatttatttatttattatatgtaagtacactgtagctatcctcaaatactccagaagagggcatcagatttcgttacggatggttgtgagccaccatgtggttgctgggatttgaactcgggaccttcggaagagcagttggcgctcttaaccactgagccatctcgccagccccttctttatttttttaatcgtatgttttgcctgcatgtatgtgtatgcaccatatatgtacagtgcccacaaacagcagaagaggacgtcagatctcccgggactggagttaaaggtggttgtgagctaccatatgggtgctgagaactgagcctgggtcctctgcaagagcagtaagtgctcttaactgctgtgcaacccctcagccctcttcctaatttttgtttttttgggtttggttttcggttttttgggagggtggacatgagtgtgtctgagtgtgtgtgtgcacacggaggctaacagttggcatccagtgtctttctgaacccacagtcagaccggatggccagaaagcccaaaggttccttctactctgcttccctgctgcaggggcattgctgggtttgatggagcgctagggatcaaaccccgcctctcatggtatgtgggaaacttcatcaaccgatccatctccccagtctctcttgttttgaggcaaactctccaggtcgacctctggctggtttggagctttttatgtagtggaaaccatccttgggtttgccttaatcctctaagatgtcttgccaccgtgcctggctgtcttctctacccgttccccagtagctctgagctctctaggtcgcatttacagcataagctttttctccacggctggcaagtgtctctagcggggtcctgggtgcggatcactctggcagtcacactgcagggtggctcagtgccctctccagacttccctgcctccctctcagcagggacatcccttcctttcctgcactctcgttaggtcacttcaatggaacagtgggcaaaggactgaccgtggaatttggcctagataatggccaccaccctgcttagctatgtggcctcgaacaggtgttggtgctccgtgttctggagtccgtggagttgatggtgtccgtactttacagaggtgtggcagtcacacccatgggacgcagaaaggatgagatgacatatatttagacctggcccccattctcccgtctttttttagaatatatttaaccaaggcctgaatcagcatgttctcctgcttctgtttccattccttaattcagtaggttcctaatgcagagatagtggcttcctgcttcctcagtcagcagccttggtgctcccacccgggcagtaaaatcaccattaagcaatttgtctttcaggactagtttggtgcccagtttctgtcttctgtccaccagagggcctgtttcatcctctcaccagccttttggccaggctagtcttcctcccaggtttagccaccatcccacacttcctgagttttttccccaataccccattcagtcaagccagtaagaactgagtgtctccctgcagcagatcttacagccaagagacaaagaccaagcttctttacacaaaccgcttcctaggttttcccagcatagcccgggtggcatagcccgggtggagtagccctgatcccgagcacccaagaccagcagtgtttcaaactccagacatttggtggtttgggcagatagcgcagtaaggacagccaagtctaaacacaaagttcatttattatatttacgtcttccacacatagcctgaaggatatgctatagattttaaaaaataaataaataactttgtacatggagctgtttcaggatatagggtttttccactagcagtattatgttaacacccaaaaggggttggagtttggatgctgggcctgtagtaatactagtctccctccagggaggctccactgagagaaatgtgaacgcaggcaaactcagaagtgcctccctgtgactcttcgaaggtagcagctgtgttatgttgtctctctgtggttttgtctccttctaagagtgagttaaaattcccttgagcactcttgcaaggatctattttatttttttaaaacaaataatgtaaagaattttgtcaaagtgaaacatttcacaacactaataactgctaatcatagtttttggtacatctgatttttctgtttagctctgttaccatctgtgtgtgtgaattttatttcctgcccaattcaattacatcctaaggacattctactttgttagctctttcttaggttggttttttctttttcatttattttttatttctcgtggagctaaagattaaaccacaacctttggcatgcaaaacatgtacctcaccctcaagctatatccccaacatttacagtggtcattttaagtgactctagaatattcctttgcaggggagccatgatttgtatataccacaagtctaaaatagaccaacaaacagtattttaaacagctaacatgagtgttttcagcattttgccaggcattatttttttttctacatttttttttcttttaaccagaaagatctgttgttaaaacaccattgtttgcaaaatgtgtagtcagccttcccaggcctctctgagctcgtgttactctgtaaattggcttaaggggcctttttggtaaaatgaaaaattaggcaatggaaattagtgtatgttcaaccatactgaaagagaaactttcagaccagctggcatcctcgcacctcggccccggcctcagaaatcaccgcatagtgcctcttcagggagggccggtgtgcgatcggtttctccatgagaagacaggaaaggactggaatgttctgcggttacaaatcaattttaatgaaagtgacagctttaagagttatcccagaaaaatacagacttacattactgtttgcaatgttaaagggaagcaaactttattgcttaggacaagccacctgggccagaggaattcgggctgaaatttgataagtagttttgttccgattaacgggttagtataataatgaagactcctcatggatgaaggtacaggtagcgttttctgactttgaataagaactagtatagcctaggcaatgatcgtgaaggttaagacactggattattccggaaacatnnnnnnnnnnnnnnnnnnnnagacatgtattatcccctaaaggacaagaaataggctttaaaatattgaacaccccaaagctccagtcttttagggagcccaacaccccagaaacctcttccccacatgtccatctctccatcacaggccaaggccaccagtcctgttcactgccagtcccaggtgtctgcttcccaccacgagcccagtgccactctgacatcaggatgccgtagcttctgtggaagccaaatactgggcctgccgtggtcctgcacctgtgcctgggctctggctcctggctgggattggttacttaaaggctcaggcgtactctgggtgttcctgtgaaccccaccaacaccatgggctaaagaaacgacttaggacaagttacaagtaaaggagaccaccccaagccccactgcctgccttcctcctgtgcaggcactctggtgccctcgccatctcctcccgggaaatgtcaggagtcaaagatcggtgccgcatgcaccttcgtgaccctgcccaaccagcacaggactaagcatagaaacagtcctcagaacctgctccagatagaagcgaatcaggatgtagccaccgttagctctgccgcttagatgccagctgtgtgtttctgttgctttctgtggcgttggccacatctctcttgtagagtgggtagaatctggcgctgaattcacacagctctttttccctgtgtgtttataccctggtaggtcacaatgctctactctggcattgtgaaagacaccaaatccaagtgggatccaaagtgccatttggatgatgctgtagtttgatcttacctcgtttgcttatcttccctttgtcaaactaaactttgaatggtttgctatagacttaaaatacatctgatggggaagtgacctcaaagtctgtagccaaccatgtttctatactacacggcaaaaaaaaaaaaaaaaaaaaaaaaaaggagatggtttatttcatgtgaccgagtgcctagcatctcaggagtgaaggtagctgttagcgctactgaggtgcagcccgttaactttgcaagtgttattctgtctttaaaaataaaagttgggggctggagtgatggctcagcagttaagagcactggcggctccttcagaggaccagggttcaagtcctagtattcgcgtggcagatcgcagctgtctgtaactctaattcatggagatttgacaccttcatacagacatatatacaggcaaagcactagtacacgtgaaattaaataaatttttaaaaactggaagtttatatgtatttggctgtgtgcgtgagtgtgtgtgtgtgtgtgtgtgtgtgtgtgtgtgtgtgtgtgtgtgtgagtttgggggcgggagcagagacagagaggcggggccacggacatggcagtggcagctagggtgagagacccaagggtaatttgtgtattattagggtattatacatttagtaagttggatcgcaattgtcactgtaaacagccctgaggtttttaagtcacaaagataaaggaagtgtctaacctgcctttgtttcttggcattataaatgtggtttttcaaaggcaaacagtttcacagacaaaagtctaatccagggcagttcacacaagaaagcactttacctgacctttagtcagtctccttccatattgctgttttgcctttggtttcctttgtattgtagtgaactgcacgcaagccagcagtcaccatgttaaccacccatagccgtacaactgatagcactaactccatccaccatgattgctctgtcaccattgcctgtacccaaagctttgtcatcccctacacaagtcctagaccagcaggtctgcatcttcctgacgctgcggctctttaatacagttcctcgtgttgtggtgacccccaaccaataaagcttttgttgttacttcataactgtgactttgccactgttatgaatcataatgttaatatctgatattcagggtatttgatatgtgaccccagaggggttgcaaaccacaggttgagaaccactgccctatgcccctgataaaataatgtccctctgctgttggccgtggctgctctgtggatttgcctactttagatcccccatttgacctcctagatctgcataacatttcggatgggaagcatatatcaaaacactcgtttgtggctgtgtaatgtcacattgtgagttagtccattcatcgatggaatttccagtcatctctaagtctctaagttcacattgtgaaaggagctgctatgagcagtgcgcttaggggttttgaacaacaggattactgggccatttggctgtcatatgtatgagaaactaactgacgtctccttgtgacttaggtgtcattgtaaaatactttcagaactacttgtactcgatacccgaatcagatgccacccagcccagcccaccctcacctgacacaccgtcattaagatactcaccactagcatgtgctgtgaactgcacgaaagccagcagtcaccatgttaaccatccatagccgtacaactgatagcactaactccatccaccatgaagccaaaccttcactttggttttcagctccttcctcagcatttcccagcacggcctgtctatatttgttgattaaataacctgcctgttctctttcagtattggacacgaacgaccgatttctgagaaaaataaccattggacagggaagtacagagaaaggatattcccggcaggtaggtggcgccatcttcccggaagtatctgccctttcctcaccgtggtgtgcacagtctttgctttttgtttctggtccccagctgcagtgctggtggctctcccactctctcagggtgggtttcctgctgctctgatgagctaggacttgggagagtatcaggattggtctggaagtgacaggttcaggagacaggaaggttccagtgtcctcttccgtgtgtttttggctgtgtttctgggtagactcattcgggaaagtcccatataaaagtactgtataatgatggaaaagtgaaagtctctgatatatcactccagtttcataagcccaaggacaaacacctacttattagatttaatagtactgttaaagacaacatgtgtgtggggaggtgtggggggacttatgagctcttccatttaataggtctatgatgtggaatagtggcacttaggaaatataaattcattccataattttttagccaggcacaatagctctctgattttttttaacagtaaactctttctttggaatttttttttaatttattgcctttacattaaatttttattagtggaaaaagttactgttataacagccatttctcataccaaataggttttgggaacttctgatattctctgaattaaacggtaaatagggggagatagctcaatgggtgaaacacttgctgtccaagcgtgaagaccagagtttgggttcccacacccgcatttatgttggatgggcatggtgacccacctgaaacccaagcacttaggagacagagatgagatactctgggccagatagctctagttgataagctctgggttcaagtgagaggctctgcttcactgtataagatggagcgtgatctacgaagacactccttctttaacctcacacgtatgtacacatgcataacacacacacttgtgaaaggaagccgaatatgggcttggatcaagaagcttgaacctccctccttgccccagactctaaaactttcacacacaaccagatttcatacaatcagcattctctgtaccagaaaacaacagtcattcttgaaaagtttggggaggaattggataaatggagagaacaacctagaatatggaggaaggacctctgaatgcaaaggtgagaggcaccctagctctcagaccaggagaaaccagcaaccctttggggttagtgatttgggacaacacctggatgctgctgggtgatgccctaaccgtggcacttacacacctggtcacagcctggacatggtgtaactcggccttgcggttcctgagtaggagtccaaggttagggacggggcactgccgaacccatagggaaccattcatgtagtagtcacagactgtgagtcccaacaggtgtcagtcaagtgtcacatttagagaaaacgaacacattgtgaccccttatttgaagagaacctttgaaatgtgcgtgttaagcacctaaaggatagcaatgggcctgggaatggctccattgaaggagccaatggcaggtcaccctccttggagatgtaggtacagaagctagacttgtctgacattgtgtcctcacatatatgagagagagagcctcaagctagccagcacctcacatctaaagaaatacacagcatgaaaactggccaggcctgggaagaggagctcacatatccacggaaacaaaataggagaccagttgacagagactgagcagagggtgaattctcaaaggggttaaagagctgtaggcccaatgagagctcactggtacttcaagacctgtattacgatattaaaacttataacatgggtattaaaaactgagattgtaggattaagtatactagaggtgcttctagctgaggaaatctttagaaatgattctcagaggaaaccaatacaaaagcttgagaaacagaaagcacatatctggaaatcctgaaggccataggtttgatccccaaacccacccacctttgattacaaagattctagcagggcgtgacaacgcagaactatagtcagcactactataggaggctaagacagggaggagtgcaagtttgaagccagccttggctacatagagagaccctagctcaaaagaagtccaagtggactaggggaggtggctcagtcagtaaagtgcttgttatctatttaagcatgagggccctgagtttcaggtacccagcacccatgtaaggataatcaggggtggcggcatggacctgtaatcccagcaccggggaggcagagacagcggaatgcttgagaactgctgtacagccagtatagactagtcatgggtaaaaaaacatttgaggaaaacattgatgccagcctctgggtgtgtgcacatgtatgtgcacacacaaccacacacacacacacaggcaaaaagagccaccttttagtaggcgtctacagagcactggccctcagaacagtgggcaatctattcaaagaagggaacttcttggcctgaggaaagcaacatttttgttttaaaaacaaatacagagcagaaagtgggaaggaaaaagaagaagaagaagaaaaaaaaaaacatttctgcctggaaacatcaggctgaaattttagaacatgagaaataaggaagaaactcctaagtgctgccaacaagaaaaggtcccaattactcacaaaggaataaaaaaattctccatcaacaacaccaaacgccaggtggccttggggaaattcattccgcctcctgcaggaggaggataatagaagcttcggcaggacgaggaaaccagcagtgctaacatgaagcacatcaagaagagctttagagagcaggaacaatcctcccggactgacagccattgacggccaccatagagcgaggccatcgctgacaaaaggcagagactatgcaggaaacaatacatcatttttgatatgttttaacatcaagatcttcaatataaaacagaaacattaagactagtggtcatctgggacatatgacccagagattattgtgcctaaaataagattgctcaaccattaatactcagatatggctcttcccctggccaccttatgtcccaccacagtgtcctgtccccaaattcacctcgcttcagctgaatcctgcacctgaatcccttcctgtcatgttctatcccctccttaaagcagagtttcgggttatgtattctatacttagggcaaacatttatcacagtgagtagttggtgccagtagattgttgaacaaataagacaaatgaaagttgaaagatatgaaaataaaataccactgtaaaatggtatctatgttgctacaaagtaagacagtagtgctgctagcaccatgtggggcatcgctgtaatcctagcgcttaggaggcagaggcaggaaggtccgtcccgtcccccggccccgtcctccccccataggtttgaggacagcctagtgtaataaagggttatgttagagtgctggttgcttgatttagccctcagactctatagatcatcatcctatattaataaaggtaaaactgtatgtcactggtttcattagctcatatagatatatcaaccagctcaccaatttctgttaaggacctgtgggctatttatagtgattatctctcctaaataaataggctgtaacaaacatgtttgtgtttagatgtgtacttttctggtatgattttgaaggtagatttccagggttgtaattgcagagtcggtgcacaaatggcatggatttctacatgtctcttcagaaatgttaagtccactcacagacttagctgtgttgtacactgtcctttgtatttaaattggtggctaactgagaaatagtataaacctcatttatccaattatatgattgtaaagtgttttatttgctaaacaacattaagattcctctcccaagcacactggttggtaaatgagcaacactgactctcagatagcctcagttgcttaaatgatccttagagtgactcaatttgcatgtgagtgtgtatatgtataatcagattagtgaaggctaatatggaactcgtaggtagctcagactggccccaaattcatgatcctcctgcttcagtctcccaaatgctggaattagaagcatctacaatgatgctgggttatagttttagaaataaaacaattctaagtgaagtacttgtataacacattgtaaattctacttgattactacttagatcatattgcaaaagtatttctaggctcatgttatgcagagacaacagtaacattttggtatttttaatgcaatatttacagtgttatcagaacctaaaattcatgcagcaaaaaaatcacttgttttagaatgagttacattgagactataatcatttaatatagctgtatttagctttcaggcaatattttttcagtaaatcagtggttaatacaatctcaatcaggaaggagccagcaagctccttccttccttcctccatttcctcatctgtctgtgatggaaataggtaataaaatgtctcataaggtgatcccactagnnnnnnnnnnnnnnnnnnnnnnnnnnnnnnnnnnnnnnnnnnnnnnnnnnnnnnnnnnnnnnnnnnnnnnnnnnnnnnnnnnnnnnnnnnnnnnnnnnnnnnnnnnnnnnnnnnnnnnnnnnnnnnnnnnnnnnnnnnnnnccttttgggtgttaacataatactgctagtggaaaaaccctatatcctgaaacagctccatgtacaaagttatttatttattttttaaaatctatagcatatccttcaggctatgtgtggaagacgtctccccccctctgtgtgtgtgtgtgtgtgtgtgtgtgtgtgtgtgtgtgtgtgtgtgtgtgtgtgtttgaacctgtctgactcacactccccgagggatccggagaatttagctagagcttaccaaagtggcttggtgtagatgcttccccggtgcctggacttttgcaaactgaaagaagtactcattccttgtctctgctcttcgttcccactggactctgtacagcctgttgttggagccaagaaaagacaggaagaaaccctgggaagtttttgaagaaagttagagctctctggctgttgttgccagatacgatggagccagatcctcacaaaacagacacagaatggttcctctcccttcctgagctgctaggctaaacctatgctgagatttaactctgaggaagccagcaagatactctctctttttttttttaagatttatttatttgttttatgtatatgagtatactgtcgctgtcttcagacacaccggaagaggacatcagatctcattacagattgtgagccactatgtggttgctgggaattaaactcaggacctcgtaaccactgagccatctctccagccccagcaagttactcttatcctaccatcttctcatctctcctggactcatatgcttataattacatatcaatagaccatgactcagtggtagaatgctctagcatgcataagatcctgggtttaattcctacctcaacaaaaagaacagagatcagcagggcagagaggaacagaaagtgacctccctcagagactggttgctatgaatggaactaactattaggttactgactagttcattcagcatgaactaaacacttactgggtattacaggctgctgtccctgctggacatccacaaggaatctttctgtgtggtccccacctttgtggccagacattctagtgataaaaatgctcagaagacagaaaatgacagtaacatttttggggatgggagggaaccaaacctggggcttcatatatatcagagctgtgcccctgttcttcattagtacttaattgttagactgaagcagactacagtggtgtgttacattgtgccaccagtttcacaggccttaccctggcaactccttgacagaggacagtagacaatgtgggcaatctagagaggccatatgctgtgtctctaggaaagccactgttcgtgtgagctggcccacaggggatagcccccagctatgactgctggaagtgtccatccagtaacgtgcctcagctgaccacaggatctgttttgctgtctgcaggcacagtttgacattgcagtggccagcgagatcatggccgtgctggccttgactgatagcctcacagacatgaaagagcggctaggaagaatggtggtggccagtgacaaagacgggcagcctgtgacagctgaggacttggtgagtgctgctgagaggctctgtctcaaaataaaaaggaatgtattttataagcatagcattctcacctggtttgccttgaccagcctggggtgggtcagacatgggcaaagataacaattccaggggcgtggtcagtttggtgatgctaatctaggaaacagtaaaggggacaaatcagccatggtcccagttctcctgatttatgtgtctttttctcacctgtagggggtgaccggcgctctgacagttttgatgaaagacgccatcaagccaaatctgatgcagacccttgaagtaagtagttttccttttatttttttatttattatttttattgatttttttatgtgtatctagggtggggtgccacatgtatgtatatgcacatatgtggaagtcagaggtcaatctctgatattatccctcagcttggtgtttgagtcaggtgctgttcactggcctagagctcactaataaggttagatgactagccagctagcactcacttgggtccacctgtctctgcctctccagcactgggtccctctcctcccctcccctcccccccccctctctctctctctctctctctctctctctctctctctctctctaacttctggaattcaaactcagatccttcaggtcagggaccttactgactgaggtatctgcccagccctgttttttggtttttggttttttttttatgattgtttatagcatagcatttgcctttatcggacttactgtagattacaaggcagtatgaatactcctggccaatgagagtctaaatgaaaatttatcaattcatagggatgacttaaaccctggatttggtttcactgactagaacaggaacatcgaaaataaatatctgcctaatacagccatgggtggcagtgccacatttatgtgactttgtctgttttaacttttgaaaatacttcatctatcatgttaattataaattgtttgcttataactataaattgttttttttttccaagtaaaatacagtaagtactaagaaatgttttctaagagcatattttcagctcagttttgtggtgacatcagttttgtaatcttttatacaaacactaaaattttatcttatcttctttgattcaaagtgttttcatctctctctctcacagacacacacacaccactcattacaatctagtttctatgttcctgaccatattcatttgacatagccattgtttaacccttttcttagctaccagtttttaggatttggactcaaagaggtccaaatcgggagggagtatctggattgtgtttagcaaagagacaggtctgaggctagagatgtggctcggcaagtaagagcatttactgctcttgcagagggattcagtttgactcacatatgatagctcctcttctaggggataagatgtcctctttggcctcctctggcaagagggcatacatatggtacatatgcatatgtgcaggcaaaacactcgaacacataaaattaatatttacagagagacagggagagagagagaaagagaaagagaaagagaaagagaaagagaataggtgttggggtgagagatgttaagactggtgtttttacagacagatgccagggaggaaaatccatgtccactttggtcaatgttactgggcggaatttatgatttgcgctaggctacaatgggaaagagggatggaggtgtccagaggatgagtatttggggaaaaagcaaaaagagaagtagaatgcccataaccatccatgtactcggctgacagaaagttgagtttgaatggatgctttgttgtttgcctttgcgtcctgggctgaactatttaccacctctacctcagctttcccccatgtaaaatggtgtcagtcacagctaagccaacagggtaatagtgacggttcaaccattgacttccacctaccatggatgcgtgctgacggcaccgttgggaacatgggctcagaggtccctgccctcctgaaagtcgtgcagtggttgaggaggcagagagcagacaaataagttcactaccttctccttggtgccatggttgtgggcacgagagggacggcacagagcatccatctctgcgttcacagactactgggcaaaggcgagcggaagccaagggagcgtgggaaaatactgctcccggcaaggaggccgagcccaggggcctggtccgtggctctcagcctttctacacagttcctcacacggtggtgactcacaccatccaaaataattgtcagtgctactttggaactgcaattgatccctataaaagtgttgttccacagccttaaggggtcgggacccacaggttgagaaccactggcctagggcgaagagagagctaccagccagcgtggcaggactgtgaaaactgagctggtactgagtcaggtaattccaaggcatccctgggctcctattcaacagatgacggtggccccagttgaacatggaacagaaccctgaaagtgccaggcctgcccctccctaacccttctataccatcctccaccctcccctgaccctgtccccatagcctgaactctttctctctctgactctctcatgagcacacaaatgtgctgtagtgtgttgtcttattcctgggtatgggggtatgggcacctgtgatcccagagagacaaagacaggaggattagaaaattgaggtcagggtagactgcacaaagaattccaagtcagcctgaattctatagtgagagcctgtctcaaaagaatcacagttgggaggtagctcagtactacagtgcttgccttggtctagcaaaacaactagtaaggaagcaaatagacactactgaacctttaagccatcctcctctctgtgagtctaatttcatttgtcctaagcaatgcttagtacatttacatcgtgtctaattttcatttatggtattgaccgttttaagattatttagacagaaaatgtatttttaagaacaaagcatagaatttggttaagatgttctcatgcgtgaactctgtgagttccttgattcttagatacacatttgggaagggcttctagaatcagtgacataggagcctgtatccatggacagcctaagcatctcatttgtgggcagtgtcttgttttggacacccccttgctagtgtcataggagagcgttgggtaccccctgcctcactacaggtggccatgatgccagcagttttcagtctgaagactttggtagattctgggatactgattgatatcatgttccaccatagactaggaggagcagaagtcttggggataaaggtataaggcctggatattcccggcaagccttgtccagagccagactgtgaacctactgatgacttaacacgggaaagtaatcctaagagctgaaaatatatccctgtggacaagccacacacagtgttcgttgatgaagtcgctaaatgctccatgtctggtgccgttgtggctgcaggctacatgtattaatccaaattaaagtttaataaaattaaagacatctttcagttgcttagccacatttctactgttgtgtttatttagattttgggaaaaggggaactaactacattttaagtaccttgcagccgcacatggacagggactacagtatcggagtacagaagtattataccctgttgatgcgctggtaatcaaccaagtaattgaagtaataaacatgggaactttctgtaaagaccattatggagactattcatcaggagaaaccaagatagttcctatgttacattccaaagaattctgcctatgaaacaaaaatcaagataaatacacttatacataaagattggttcttttgtgtttttgttttgttttgttttactttgctttgttttttagtcaatgtgtttatctcaaagtgctttattttatagctacatccgccattacatatacgtttttgtttgaatgtctgatagcaacattttgggcatgagtctactaggactccaaactgggagtttcagaaccaggactgtaatcttagtcaggttattcatcttctccttggccttggagagtaccccttgcttccctgggccttgggtttcctgggtcaggaagaggtcggctcttgctctcacattatttggttctgtgatctccatttacacggacttataaagagcaaggagactagaatgtgggagtgggattgtgatcacaggctgaagagaagttgaccaggtggttcctgttccagttagatgggagtagtaagggtctccacaccagtcaaccatgttaacagttcacaggagggtggtatggcagggcctgccagcaggcctaatgtataacctgttagctttctgttactgtaacagctatgtgagataaaccacatataaggaggaaaggtttctttgggctctcaccctgttggcattttcggtctgcctctggttgccctgttggttttggcgctgagtcagagcacagtactgagaacctatcggagattctggtcagagaacacaccagaagatgctgctcttctcataggcaggacatgaagacagtacgagaccatggtccaacagtccttttcatggagacgccccatccccaggaccaaactcctcccacaaggccccgtttcctaagacttttaccaccttcccttggtgccaagtcttcacagagacctctggaagacagccggcatccaaactccagcatagccttttatattgcacacacatcaaagcatcctgttggactcctaagttacttaattgccagttgaagtgaagtgaaggctggggagaaggctccgtgaaaaagaacacttgttttgtaagcatggggagcctgagttcagatcctcgctgcccacatacaaatctaagcatagtcgtacacacctgtaaccccagcattcctgtgtggacatgggaggcccagaaggaggaccctggatcagctaacctcagatgtaggcagtgaaaaacaagagcctctgttctgaatgaaatggaaggctagcacccaagcctgcagctggcctctgacctccacatgctgactgagacctgcatgtacctgcagtcacacacacacacacacacacacacacacacacacacacacacacattctctctctctctctctctctctctctctctctctctctctccccctctctctctctctctctctctctctctcaagtgaaataaagacttaaaccacaaaactttttttgttgttgttgctgacagaagagtcgtatagcctcgctaataaagaaaactctgaaatggaagatttgctttagattaaacagcagtccgacgggattattccagaatcctgaagcctgtgcttgttcagccacaacctgtcacctgtgtccccaggagaccaggccccgtacctccctgacagatggcagccatgagggttacagtctgtcgaggtgacgagccagctgccatccagggatagagtctgtgactttgtcctctacatttctccatggcggccgcatgccccaggcagcaaggttggaacacaggaagcttcagcgtctgtaatatgcttttctcagcgcacttgagaggttgcatagaaagaagagatgtgttaatagatgttagggttacagatagcagtcatccgtacatgtgaacaagcgtgcatgttggattgttagaaccctcccatgctcacgtcactctgaccttcttgggacctgtgtactctctctccagagaacttggggcaacgctctgttgtgaactcacagggtggctttgagacgctgtcttagtctcacactgtcttcctgctttggttcagctttctcatctttgaaccatgttagatcatgggaattttccatgctccgcagctgccctgcccccaccctgcatggctccctgctctccgctgtgtcagcaaaagggcagggcgtgttttcacaggtgaagccaagccttcatccgagcagacctccaataacctggctgggctaggaataaagcctgaatgttttaataagaaaattattttcagatagacctaaagtccgttgttatcattaaaaggaagaaaacaaaaccactctaaaaataactatattgacagggttggtttaaagactttgaaagcctagaatttttactagttcctaataatggttttgtcttatttgtaatgatgctgattggtttgttgtcaacttgacacagctagagttattttggaaaagacgaccatgtccccaccagactggcttttgagcgagccactgattgatgtgggagggtccaccttactatgggtagtaacatattcaggctggtggtaagcaggctgagaaaggcaggagagaaagccagtaggcagcacccctcatgacctctgcatcagtttctgcacccaggttcctgccctgacttcccttgctcagggacagagtgtgacctgagagttgttgctaaaataagccttttcctttccaggttgcttttggtcctggtgttttatcacagtaataaaaatcctaagtagcatagtaattagtaagaacgtctcataaataaagtacagtatacacatattaaaatgtcatgaagaaacccatttttctgcatgttttctttaaaagaaagtttaatagtaaactttagttgtatgtggtgggtggttggctgtgattccagtgtttaataaatagagactggagtatcaggagttcaaagacatcctggactatagagcaagtttgaggccacccaggctatataacacccagcttaaacaaccacaataaattgtttctatcatttggacatgtcacccatggtgggtattttttttctttttgtttgttatattaattgccagatttctaacatgtaaagtttttagagtattatttaaagatttaatcagaatattttatttaaatgagaaagcaactttagcctagaaattgaaaacaaacaaacaaaaatagcctaagcttgtcctttatatgtaattggcctgtctggttttcataattcataagttatgttttttttatactcagttctttgtaggtttgtttaagacaaaatcttatataaatctatactgacatcaaactcctaatctttcctgctttaacgacccaaatgccaggattgtgggatttttctctcctccttttccttctcctcctcctcctcctcctattatagtccactaatagtctactattcctccattcctctctttctgcctccctccccctcccctcttctcactatgtagtcctgactagcctggcactcactgtgtagaccagactggccttgtattcacagagatatacctgcctctgcctctgcctctgcctctgcctctgcctctgcctctgcctctgcctctgcctctgcctctgcctctgcctctgcctctgcctctgcctctgcctctgcctctgcctctgcctctgcctctgcctctgcctctgcctctgtctctgcctctgcctctgcctctgcctctgcctcctgaaagcaggaagatttttgttaacttgactatttgttcactttaaaaaagcaaaatcaaacaaacaaacaaacaaaaagaacattgaagatattacttaaactatcacagtttgattaaattatttttaaatgtataatgtggaagaaataaagtataaaacttatgttatgataaacaggcaatgagcagtaacttatcaaaattataatcagaggtgagtgtgttcttagagatctcttgctcagcattaactataggctcgttctgtctaaggagacttagtgtgtgagtcaatcagggtgtctttggtttcagtttgttttaaaggtttttcttctgtcttgtctttttgtttgtgtgtgtacgtatgtattcatgtttgtgtactgtacatatatgcgcatacatggaggcctcagtatgacattgggtatcttcctctgtccatcaccacttggattttttggcagtctcccactgaacccatggctcaccgattggctagagcatctggcttgcaacctctgtgcatccccccaccccccttctcaggtgctaaagttacagactggcgtcaccatagcaggcttttacgtgagacctgaggatacaaactcaggtccttgtggtttctttgtcaagcattgactgagccatccccccaagccctgcttttatctttaggttgagcccctgtactccaggctggtttctaacccttctgtagcttgatgtgacttcgaactcttttacttttttatttttttggtttttcgagacagggtttctctgtgtagccctggctgtcctggaactcactttgtagaccaggctggcctcgaactcagaaatccgcctgcctctgtctcccgagtgctggggattaaaggcgtgcgccaccacgcccggcgacttcgaactcttaaaccttgcaccactacccccaagggttggaattacagacatgctccaccctacctgactcacagtacctttagatctctcggtgtgctttgactatgcagtagagacacagagtgacaccaggcacacttacacacccagcagtctgtggcaccttgtgtccccaagttaagtttggtctccattcttctgtttcctttggggctctaatttattctcgttcttctgcagggaacacctgtgtttgtgcacgctggtccctttgccaacatcgctcacggcaactcatcagtattagctgataaaatcgcgctgaaattggtcggcgaagaagggtttgtgggtaagtggtgttgtttaaaagtattgattataaaacattgatgaaattggaaagataatggctgggattgagtgttgacatgaaatctcgtcctttacacttttctttgtagagggtctcagtgctggagaactcttgttctgtaacagcacagttatgttgctgactgcagtcaagcacgtaggcctttgaaagttctaatacccatcaactgaatgaccttggatatattttaagtatactgaatcttggttttcttatctgcaaaatgttaatgaaattattttaattagtcgtccaatggctatgtattcagaacataccacattcaaagctcagaactagggaatccagtggttagcagagcaggtctaacagcaggccttgtgcaatcttctatcagtggtatgcacgggaggttctcctcactgactgagcaattagcagccatcagaagactaatattaaaatgatttttttttcttcctggaatcctggtgtgttttcacaacccaataaaagggaagttttccagccaatctactcacattttatttgctaaatccatactgtctgctgtggtcagggaggcacctgccgtagcatttgctccacagttactagccacaatcttaggccttaatagtaaagctttgacaaaaatgaaaaaccaagcaaggactgtagaaaagtgcttcacactgccatgagttttatcagattccccctgctgccgtagacagttcgttttcatgtaaatgcccataatcaggtacagcacttacttcctgcatacctaaccatcagccttgtatcaaactcaaaaagtgaggtggttttgttttgttttgttttgttttgtttttgtttgtttgtttgtttgtttgtttgtttttttaaaaatctgctgggcagaagaacctagatctacactttcatgctgtggcatattcaagactgatttaagaatcccttgtagacacaaagatgagatcaaatgaggattaaatgtaattccacccttcaaagatctgtgtcatgcagcaatcatgtactgagtccccagcaggagtggcgaggctcgaggtctgggtggatttgcctggttgagcacgagtagcagtagagctaatggctgaggaggctggggaaaggcagatactgaagagatgggcacttaagtgagaggcttctgatacatcgactgtggataaaagggcttccaggataaagcactctgttttatgctgacagagctccctgccttatatcatcaagcaggcatttccagagcatgcatcatcgtatctttagagatatatgctgatggtgtctgcaaagcatgctagccctcctgtgaccttagactctaggagtgttctttgaaggttttcttatttagaccgtgtgaaggtggatcggatgaggagcgggtactgagaggtgggactgatccaggctttggagttgtggaatgggagccttcttttggtagcaatgaagcaagagcttttctagggctcagtttcccctttgttataatagtcaataataaattgatttgtaaaacaggagaactatgcatatgccccccattactatttctctgaccccttgtagtctgaggggagatccccatggtaattatcttgcctgtagagagacgcagaactctcttaacaccgtgttaactctgtgccccaaattccttgttgggaaagtgagggctttaaaaatagaaattatgagtgtgtgtgtgtgtgtgtgtgtgtgtgtgtgtgtaagacggggagacaaggcagctgtgacacacatgtagaggtcaagggacaagcttgtgggattggttctctcaccactttagtgagggtcctagagtttccagctcaggtcgctaggtcagcttatcaagcaccgctacccattcagtcatctccccagccaaaatcaggctcttcacagggctttctggatggactttaaaagatggggtgtggcatttcgcctgtcaaggtctggcctgacacccactcatccttagccagtcctcatggtctctcttccccgttatcaacacatggttaataaaagttaaagtcctgttttaaattgagtttattttggagtgataacaaatttcatgttagttattgtatagtgcacatcacttagagcggcagttctcaaactgtgggtcatgacccgtttgcaggggtcaaaatagcctttcactggggtcgcatatcagatacttatattcagttcataagagtagcaagactacagttatgaagtagcaacagaaataagtttatggtcaagggtcactacaacatgaggaacatcagagcattaggaaggctgagaaccagtgacttggagccttccatcgtagcagcacagcaagagaatatagtctgccactgcacctcccatctccagaactcttcatctttgtataagaccttgcctgactccagcacaatccatctgcttctagcttgcagacacagttttttaccctctagtaaatcgggatgtggtagtggagacagacctttagagtctcagcagagagtggggtgcactgtgggagccaggttctgtgttggataacaggaacctggagacaggcgggggcatctcctggacaggatcttctttgtttcctgtcctacaacatcatgttcagttctgcttctacatctaggcaaggactccttttgtctacccagaataattattctaagataatggaatcaacagtccatttagcctgacaacagagcggtgtttatttaatcagctgcatgaatatgtcagacgagagcagggcttcatgagaattttagagaaatcaccacagcgactgtaatggcccctttctattagccagtggttcccatgggagtccactcaacctccgtgtaccgccgaaaggcaggctgctcttgggcagcaaacacaactcgagggttatttttacaaaaagaaaaagaacattgacattctacatttttaattattattactatctcatttaaagtgtttgtaagaatctcaaaattgtgcacaaaccttagctttttctttcttgtttttattccttttttttttttttttttaattttctttgacaattttcaggtaaagactcatgtctacttgaaaatgtggacctggaactgtacatgctcatagccaagggctcttatagccaaaatagccacagccacagaagttcatggatagactctgaaggtctactgccccctcctgtagttaaatactgataaaatagaccagatgtcatggcatatgcttgtagtcttagaaggccagcccaccctagtctcaatgactcaagcatcctccacctaaatcaatgaataaatcaacttaattatgatgcgataccatgctaatacatcttaatatgtgtagtaataggttgtgtttgtatctcccccaatcgcccacttcctattgctgtagtgcagtgccgcagactatgtcttaaaagaagtccgattggacttttgttcttagtgtgggttggctgaggactcacatcttctgaggcccttctggctggcagagttgtgaggcaacaaaaaaacacacaagagtcagagagagaatatatgggtgtgcatgctgtgtgtgtacacgcacatgcatgagtgtggggtatgtatatgtgcatgcataggcctggagtctgtggatgtgtgtgcattgcatggatatgaggtatatgtatgtgcatgtatgggtatgggggtgtgtatgtgcatgcatggagtgtgtgtatctgtgtgtgcacatgcatgtgtgtggtatgtatgtatgaatgcatgcatggatgagggatgtatgtacatgtatgtatgactatgggggctgcacatgcactcatctgttcttctctctccttttttaaagtttctttgttttttctctgggttttttgggggtgtggggctgtttcttgcacatgtgagtggagatgacttagcagtccagaagagggcatcagatcccatgagcaacaggtggctgtgagcacacatgatattggtattgggaaccaaactcaggtcctctaccagggcagcacaccagagctcttacctaaggatccatttctccaacccaggagagctttttaagacagggcctcagttagtagctttatttggcctggaactcactgtgtacactaggatagcagagactctctgagctctgcttcctgagtcacagccaccgccccattcctcttctcaaaagcccgccagtattccattacaagacacccaccctgctggccccattgaatccccaccagctctgaacaccagagctggtgtcaagcagacttcaccctctcgtgcctcatagcgtctatttagatccaatgggagtgcagggaggaaaaaacagtgttctgatacagcactctcctaccgggaaatgtctttctgatggattgctgagtcaaggtcaccttgggtaccactgactttaggcatctttcttttgactttatcccttgtcctttaagacgcttgtaaatcttgcctcttgagtttcagaggaatccactgagtagttacacccagcttattctcgccatctgttttattgcaatgaaatgttaaatactccatcatttaggtagaagaaagccagaccaaactaaacattcctataatttcatccaccctttaaaaaaaaaagatctgagatctgagttgcaatagtgtccagcttctgagctgaggttcctggagctcaccctgttgacatctaaaactctgctcttggtcaggggcctcattctgttatgaagttcattcttgggtcttgagtaaccctatacataatcacgtcaggggtaagaactgcattattagcaatctggctggaggggacatgcagccccagccgccgctgagtccagggaatggagttttagcaaagccacactgtggggatgttggtgtgtggtgtccctggatgtcagtatcctgcagctccttgccaactcccgttctccagcccctctgtgctgacctctcccttctatgcatgcttctatacagactgacctctcccttctatgcttccatacagactgacctctttgtggtttaattgtgcttttagtttctaacaggtagtcttcagcctttgaaaagaaaaaaagaaagaaaggaagcaaggaagagagggggaaggagggagggagggaggaaggaaaacactgagaaagacagacagacagacagacagacagacagacagacagacactgaaggagtcccagtggtaaagtgcttttctggcatagtcaaagctataggttcaacccccagcacaaaggaataacaaaggctagacagatggcttgatggttaagagtcactgctgctcacacagaggacctgggttcaaatcccagcacccacatagcagctcacaactatctgtaactccagtttcaaggatctgatgccctctttctggtattagtgtgcaccaaacatgtggtgcatatacatgtacacaaacactaatacatgtaaaaatggaaaataagtaaagaagattggaatcttttggttatctgctacttgggaaagtcttcagactaagttacccgatccccatgttccagtcgatttccccaagtcttgttagtttgtttgttttgggtttaggttttgttttttgaaatagggtttctctgtgtagctctagctgtactataacttgtttatagatcagactagtctcgaaatcagagatctgcttgcctctttgtcccgcatgctgggacatacacacacacacacacacacacacacacacacacacacacacacannnnnnnnnnnnnnnnnnnncatctctagcttcatcacatcttaatgtgctgtttgtgtgtgctttaggttcaagggttgattgttataagacagatagagctagcctggagataagagtccatggcagagtctagcatggctggggccttagagtcaattcccagcactcgaaaagaaggcagagacatgagatgtgatcagaacctctgtgactttgctgctgtgacttgaatcgttggctgcctaattcctcttagcaacagtcttgggaggtagagcctagtggtgaatggattaaaaagccttggcttgaagttggctcctgagctcaggaacagacctgattcctctgacgtcacccctcctgtcttagctgtgtcttgaagttgtcctctacatgtgtctccatcttctgtgggtcgcccttctaccgtgtcccaggtgagtctcacacaagcagagcagatggtaacagcttgctgtttgacttctagaactgtcagccaaaataaatagattttctctaaaaaaaaaaattaccccatcacaaatgttacagccacaaggacctaacctcgccttagttgcatcttttttttccttgcttctctaaaggaaagcactgtccaggtgtggaagaggtatcgtttccaggtatgcagtaatacttctaccacaaaagatacaaaagacggacagtgaagcttctgaaacctactctgtttacaacattaggttacagtaattttttgacagcaccacagataaacccagagttaccagccatctccatttattatgtcactaaaggtcaaacaatgtaatgggtatttgtaacctaataagttataggctgtctgtgggaatagcacatagcacttgaaaatctcactgtgtcattcataaagaacctccatccctcgttaagaaggcaccggtactggccccatgcccggctctcagctcctgcatacagggctgtccttctttgtccctatagcaactgttctcacttagattcacaacataatgggtgttgtttaacagacatgtctcttggatcagtgatctgcatcacagcagtggtgccatgcccaaaggatgtctcataccacctacttaccctcaaaaatgtaaaatatcctggactggaaagagggctccccggttaagagcacttgctgctctaatagaggacctgggttcagttcccagcacccacatggcagctcacaactccagctgtaagggatctgataccctcttctagcttctgagggtaccaggcttgcatgtgatatacagacatatacatggagacaaaagttctatccacataaaattcaataataataataaataaacaataataatagagtttttcttaatgtgaagtatgtcaagatgagatggtacctacctatcatcccagcacaaacctcaggcaaactaccaagaccctagctagcccaaggacggggggggggggggggggcggggacaaaagtatctcaattttcttctgaggtttttgtactttttagattcattcattcatttatttatttactcattcatttattcatttatttgtgtgagaatggcaaggatgatgcttacaattcacacaggcagtttcgggcattgatgcatctttgctgagaacaatctgagtttacattctgaaaatccactatgtgcccagcactggactagagctttgtgcctgagaaccccactggcttgtggcaagagcctttgaaggagtttaacactggccacagtttccacatgagaggattgagccccagagtgaaagagtttgttccaaggtgacgagcagcgatttgaacccagtccttggccctgatctgaactcttgcttctgtgtcttactacctgtgaatgtgtacttggggtccacaccaccatcgtccagccctgtgtttgcacacaatgggactaatgtttgttgaatgaaaacctaatagtacacatcagttatatgaaatacttccccaatgacagggttgtctgcaatgccaataggctttttaacagtgaacataaacatatctactgaatggtttattgaagtagcaaataattaaattaaaagtaaatgaatgctacaaaggcatgtgactgcaagtctagctacataggaggctgaggcagaaggatgatttaaattcaggagttcaagaccagcctgagaaatagagtgagcttcccaaagaccccatgtcagaaagggagaaagggagaaagggagaaagggagaaagagagaaaaagggagggagggagggagggagggnnnnnnnnnnnnnnnnnnnnaaaaagaaagggaaggagggagggaggaaggaaggaaggaaggaaggcaggcaggcaggcaggcaggcaggcactggagagataagcagctgatacaatgtttccttaacattcatagctccatgggtagaagcccaggaaccccatagaaactagatgtggtggtgcttgcttgtgatctctggcctcaggaggtggatgctgaagatcagaagatcagcatccgcttcagctataatgtggtccgaggaaagcctgatctacttgagcccctgtctcaaatttttagttgggagctagagagacagctcaggattaagagtgtttgcccctcttccaggggaccaagttgggttcccatcccctgcgtctggtgactcacacctaactccagctccataggatccaacaccctctacagcaggcatatgtacacacatggtctacactcacaaacacatgtaacacataaataaaataaaaaattagtctttttttaaaaggaattttagaaagaaagatgttttaaaagacgttttgaactgtaggaatgttcagcctgaccttggccagtttcttcatgccctacgtaatgcaaatgtgtttaacataagctctgtggctcattcccgtttggatttatgtataccccaaacagcgtgcttggcatagcatcctgcttatcaccataaaatgtggagttcaaattcggcccttgtcaaaacatcggggcgcagagattagtgttgtggcagttgacataaaatgacttttaaaagtggtcctgaggttaagctggggttttgtaactcggcgattgcatgggccttctaagggattttctttaatgtccgttgcacaataggttttcagattacgttacaggcctgctatcttagcccatctgggccaagcacatctagcctcgggatgctggacaggggccaaattgccttttatagttgcaaaaattgcaattatgtgaggttgtttgctacattttttttagcagtatttgatataattacaatattgtactgttcctatacaagtcacataatagaatttgagacaaggaatgctggggaacttgcagttcctgaagaaatataatgtattatatcttgtcagaggcttctttgcatctttagggaagggcattctggagggaaagcagacctctaatgcgttctcaaacccgcaggcctctcgccacctgtaactataaatgctctcatcatttccctactaatgttttagtacaaaggctgttgtgacaaaatccacatagggtttgaggtcctgtgggctgcttgtctagctcacagcaaaacagggtttaaaaatcttagagacgggctggagagatggctcagtggttaagagcactgactgctcttccagaagtcctgagttcaaatcccagcaaccacatggtggctcacaaccatatgtaatgagatctgatgccccttctggtgtgtctgaagacatctacagtgtatttatatgtaataaataaataaatctataaaaaaaacttagagacaaaagaggtgtctgagtgaaatgataaagatagaccttcagcaatagaagaatgaaaaccaagtcaaaacctagaaaagagcatcacagtagatagatagcatctgccttgggcacacctggtcatgtgtctataacctgaccaggctgttcatagacactgtggctgttcacagcctctggagacttcaccagtgagataaagaaaagagcaatataaaatgcatagatagtagttttaatatttatgtatgatcatacagaggtaaaattcaagaagccaactaaaaaatttatcgtaagtaataaaagttttagtttgcccggttggctacagtataagtacgtgaaagtcaatagccttcctttatgtgaagaataaacatattataatgtggactgtgatcctgtttattcatcccctccgtgctataaagtacccaggagtaaatttagaaagacatggacacagagaaagaagaatacggccatttgtaaagctgaaggttacagatccagtgagactggagtgaagaccaggagtcccctcactctctccgacgactaatccccaggactgtgctgtcttacactgatgagggcaatgagccattgaaaagggactccttttaatctttaaaggggtactttattaatgttttcatcaatggtgtcagaagctcctgaacctgttcatttgctatcttacccatgtggggggagggggggctgcttgtctggcaactgaacccagtcctcttctagaatagcaagtgtccctcgctgccgagctacctccctagctcccatttttaactttccttttagacacaggactccgtgtggcccacgctggcttgcaactgaggctagacagaagctgctgaccctccatctgctggcacatgtctggcctcaaatgtctaaatgctaagagaattggtttaatatgaaaaaaataaataaaagagcaaaatttactaaatttactacctctcctggctcctttgggatgttctcagcctgcttcttgtctttattcaggataagtgagtctagcatgaggaaaatggctacagcagtggttttcaaccttcctgtgctgtgaccccttaatacagttgctcatgttgtgctgacctcaaccatacaattattttcataattacttcataactgtaattttgctacagttctaaatcataatataagctgggcatggtggcacatgcctttaatcctagaacttgagaggcagaggtaagtagatctctaagttcgaggccagcctggttgacagaaggaactccaggagagctgagactacaacagagaaattctatctcaaaaaaacatgcacacagacacacacacacccatcaaaaaccaaaagttgattgattaattatttgaaataataataaaattactatgaatcataatgttaatatctgataatgcaggacccttatgaaagggttgttcaacacccctacaggataagaaccacaaatattatctgtgtggcatagagcactgtgtgtatgtataacattttattatgaagcttattatcccagcaaaagattacattacaaagattgtttcttcttttcttctctccctccctcttttcctttccattttttgttttgtttttgtttttttttttccccaactggagccttgtggtgtccaggctgagcttaaactcactgtataaccaaggaggaccttgaacttttaatcctcctgtttctacctcttaggtgtggtattacagctctgccctaccacatccagtttctatatatagtagttaggatcaaacctgctaccttgtgcatgctaggtacctacctacctattgagctacactcctggtccccaaatcaccatttctttttctttttttttttcttttgttttttgtttttgtttttgttttttgagacagggtttctctgtatagccctggctgtcctgaaactcactctgtagaccaggctggcctgctgggattaaaggcgtgcgccaccatgcccggtgtcaaatcaacatttcatcatgcctgctagccttgcaaaagtttggagcaagcaaggttcatgaagggcaggttgaagttgttcccacaaagattgtaattccttagctatacattctagcttcgacataatgaagtccctgtaaaggccaagttcacatcctgatctttcagttaactcaatgggaagaactctcccttgagtctggcattaaaacaaacaaacaaacaaacaaacaatcaaacaatcaaacaaaaaacccagcattccatcatggaacatttcactatcagaataagaagtctccccgatgtctgcctcacaagccagatgctccttttcagagcctccactttgctgtctgtctctagtgatggggcctgtgctctcctcagagtccctctcgtcatcatctttgtctgtctctccttagtgtagtaataaatcccatgtcccccacagtctatctctgtgaccctcttgagcaccccatagacctttccatgagaagtcaggggtctgtccctcccacctcctggcctcaaaacagaaggcagagagaccttgcaaggcacctggaagggagaagggagcagatcagaaagactcaagaaactaaagcaacttccaagggatgctctcgactctcacaggaaagccaaaagacagcaagcccctcactgggacgacatctgagctgtaaacagccaagccctgtggtgggtgtctctttagaagagctgccagcatactagacagtgagctccaacgatgcagctgcccttcctggtcactccactcatgctggaggtggggctgagggcgctcctcactgatgcagctgcttaagagtccccatgtccctctaagtagccacaccaaacactctttgttccaacaacatgggctagattctctctttggtttactgtcactaccggacctacgggagatccatgtttgtttgcaactcttaaggaaaaggcacaaggcagatggtcacacagatgacatggcaggagctcacttctgcctggagaagcattcttaacagtgctgctttctgcttgagggtgatcatggagactcacagaagcgcttaactttcccagtctcccatcccctcatctctctgcatctctttctctctctgtctctttctgtatgtatatatctctgtgtgcctctctatgtgcatttctttccctccctctctccctccctctcccctccttttccccacctctccctctctccaagactggccttgaactcatgcttgtgagcatgaccttgaatttctgattatcctgcctccacctctgggatgctaagattacagacatgtgccaaccccacccaatttatgaggtgctgggggtagaatccaggccctctaccaactgagctacatccccagcccatccagcaactcttctgaaagggagagtgcctttcttcctctctccccactggttaggacatttagttatgatggcaggggctcgggcaatcattctggacccctgggtcgcggcagctgcagatgaaggagaaactggcacaccagcacagagcgccaactgtgatcttctgtcaaatgagagagaagtacgctttcactggaactgagccacttcatagctccatgtatttgtgggcaaacctaatcctgatgggttcaggcgtgaaaacggggccagctttacagacatcctagcattttcttcacttagaacatttcctcttgtggatacttgcaggctatgcagggtttccttattctgcacagcattaactctgggactatagtcagggtgatgtgtctaattgaaaagaaatgtgaggtttgcctcaagttttcctaatgaaagaactgagcttccaaaggctggaatgtggtcagaactctatgtgtcacatgtatgcatgtagaggtcagaggtcgatgtcctgtgtcttcctcgattgtccccaatatctactttctgagacagggctgttggggaggctggacctcacccttccatctagatttgttggccattgagtccccagtgatctacttagcttcactctcccagtgctggggttacaaacttacatgcccagcagtgatgtgggtgcttgggacccgaactcatgtcatcatgcttgttccgcatggagcatacccgctgagtcgtgtctccagccccagaactctgggattgatgcctcaaagccatgacagtggggaaatagctgttggttcaaaagctctggattcagacttgaatcaagaaagcaaaaaccactattttcatggttattttaagtacatgtagagattataccatgacattgttgcctgccctttaaaagtaaaagccatgtacactcatctaagatatgcatgcaattttataaagcaaaccaaaaaaaagggggtggggatacagatgcaggtggtgttgagattgctggtgtttgaactcagaatgtttgtacacataaacacccaaacacatgatacgcatctggaaactgtagaacacagctctcatcttggtgctgagccaggagttagagggatgcatctgccactcttatcatcgcaggctagactggaaaccagtgagaaataacagctagagtctcagttttatttgcacagaaaaagtctcagccttgatcgcacctgctttggctattgcccgaatctgttctgcttcctcccaggggaaatgcaagtatgaactgctgtccacaaaacctgtcagcttatggagcacttaggcactgccactgatatttatattaagctctgtggacaacatacagcagccagtcttggcgttagccatgccctctaaaattaccgaccattttcttccttttccctttcaccaagcacaccagactgtatccttgtcctataatgcgccagacacttaattctggtcctttccttcctgagtcacagctcttaggaccacaagctttgttccaattgtgttttcacacattttgaacatatgcactcaggcagaaatagaattcaatattgtgtgttctgtagtagacatacagatggtccctgcctcaaggtttgacacaaacttctcaatagtatgagagggacctacattcagaggacagcatcctgggaaattcggggtctccagggtttttttggatttttttttttttttgctggagataagtgccatgatgataggccgtcatctccactatcaccaaggcaagagctgatgggctacggtgtgaagttcagctagattagaagcacacatgcactatcagcttaacgtatgcttgacttagtctgcatgtatcaggacaagcaaggactgtctgcatatacacaatgctctcctgtcacacatccgaagtctggccttgtaaattacctcccctcccagagtgtagcatgagcccctctgactgccagagagagggagccccacatcagtccattgtcacactatcacttaatcagtaatccacccactcagtgccatattgaaataccaactttactgatctccgtatcatagacttgagtgttaaggacacttcacatgtgtctttgtctggtcctcttatggctgtggccaattatctcgtttttgaattgtgtcactgccagcagaccctctgggcccctttgtctgcgtggaacgggtctctagtcgcaggtgggcaaagcgtcagatggaatgacagacagatgcacacaggagaggttgtgtagaatctgaatgtaatttgtcaaatcaagcatcaaactttttatacagaagaaaatagggaaattgggtgacacaccggcaaggtacaaagaggttactggattcttacacaaaacagaggaatacaaacacagaaggtctaaaaggaaccacctgggatagaattcattgttaacaaccgggatcaaaaacagctccacctaagatccacttaatcttagaagccaggggtcaagggcttcgtgcccttgccatagttcccattctagtctattatatagtccaccttccccctaagccattgtaaatacgtgtgtatgggtgtaactcagctatctatagttctaagtatctactctggttcctccttaggtctcaaacttccttcttcctagatgatggtaaattcttgtgtagggcagtgacttagcttttattcaaagtgatagtgtaataccagaggcaattttgaatgtcactgaataggcaacattcttactgaattccaagcccatggtctgctcaaggattttctaggacgttggaacactggtgaaggcttggctatgtcagaattcaatcttaaaaggcacttataataagataatactaaaagagagcacgtggatccatacaccagactaacgcggaaatagaatatgaatgtatgggttagagagaacgccagcctccaggaggtgagtttccgtaaaactctgcctcgtgagtggcttccaggcctctcggcctgtcaagctgactcgaccacctgttttgctacaaggtcaagtaagtcacccatcagtattttagaagttctcctggaagtcagctgcttgactctgttccctactaagctgtaaagataaacacaggattcaaatactggagtcagggatgctccatggtttcctctgtcctgggtaccagtgccgagcaaaacaggccaaagctaccggggtctgccgtgagaaagaaacaggcaagccagttcttttgctccttacataaagattgtaggtagtaaatcctcggtcagccatgtgtgtttaagagccatccctagggttccgagagatgctttatctccattgatagagcacctgccatacgtgtctgaggacctgaatttggatctccagcactggagggtgggataggaggatgcgggcagccctctcttgctcattcatcagcttggctgaatcagtagtctccagattcagtgagagaccctgcctcaaaaataggatgctgaggggctagagagatggctcagtgattaagagaactgcctactcttctcaaggtcctgagttcaattcccagcatccacatggtggctcacaaccatctgtaatgggatttgttaccctcttctggtgtgtctgaagagaatgacagtgtacctcacatacataaaatgcgttttaaaaaaataggatacagagcaaacaaaaaaagaccctggactgaaactactgattttcgtgcacacataagaatgtgtataccagcacacaaacatatactcaccacaggtgtttaaataaaaagaaaccatgccctatagctttcaagtttaaaatatttcccttctatcttcatggcttctgggaatctagcaagtgtaaaggaacctagaggaaagccagtctgtttccttggttttcactcagtgatcagagttttctcttgctgcattgatgtagttacctgagtcgaacgaggtgctgtggctctgggatactctccttcctgcgggggctttatgataagatgtgaatgccttcacattggttcactcttcttccttagctgcactaccataaactactcttaatagaaaatgccctgcacccctcttcccattttgttaagacacatgtgcttgtagccaagccaggcagaattcttcattttattctaagacacagcctcactgtggagctcaggctggcctggctggaggtctttctgcctctgtctcctggtgctagaattatgagtgagtgatcaaagaattatgagcttcaaagttcttctctgtgtggagaaagttcacattctcacaagctgcaagggaacaagtttgccctataacactgggcatccaaaaggctaactcttccaagccagaacacaggtttttatgtgagaaataaaactaccatataacactgggcactgtggcacacacctttagtttcagcactctggagacagaggtagatggatctccccaagttcaaggccatcatggtcaatatatcaagttccagcccagtaagggctatacagtaagacagaccctgtctcaaaaaaaaaaaaaaaaaaaaaaaaaaaacaaaatacctaacatgcatacctcaatttttatctaagcccttgcctctaaacttaaatttctccttggccaaaatcaacttacagaacaaaattattagtgatgctacttaatgagctaactataactaattaactctgggggtggtgcagaaagagtaagttctgaatccttcctccaaaatacattgatactttttaatttttcaaattgttgttgccgtatgcatacatttattcaaatgtccctgtatcctatttatttattattggctttctgatactggatctcactctgtagctcaggctagactagaacacaacttgagaccaggctggccttgaacttcccaaacatcttgcctctggttccccagtctggagatggaaggcatgtgccaccaccaccactcttggccctctagactcattgtatgttgttaatgttctctttcccttcccccagagtacacccagaatagtttctccatgctctctgcatcaaccccaaccttccccagtgtgtggtgacctggtcatggggcaagcgggaaggaagggtcttcaaaatactgttaatttgtggttccagtgatctcttcctcagcttcacaatatgtgcccagtaagttgatttttgtattctctatggaaattccaactctattacatttaataaaatcaagggaccgtggattacataaacaaaacccacagagcagaaaggattttggttttagtaaaatttcctagacctaaaatgagtcagagccttacagttaatctggtcttaaagcaaggcgattgttggttttgaagctgtaacaataaggctgagcttctcttgtggttcatctgatgactcctccgggtttacttagtctccttccagccactgagaaaataactaaacgatcctcaaaggctagcccaccttgagcatgcatgtgttgcgtgcggtgactttgagctgactcttcccgagttcatcagcagggagctgcagagaataactatttacataggacagaaggggccgggaaagactcaactctatttcctttacctctgcacagaaattattacccaccatgctttagagcaaagcctagctccatgcgcctcatgtctttctatactcatgtccccttgcggtctctcatttgtcgtgagaaagtaagagtggtggcatgaatcgaccaaatctgtcctgtgccaagctgataacagggactagtgctatgagatctctaacagttcataaatctaacttcatgtccaggagtaatggggaattcaatatgttgtatgttatatgtctgttgcatgcatcacacagaaaatgtatcgctatcataaagtagctatgaaatctgacatgaccgatttttctttttattgtctgagtgcatatagaacaaagggcattttagtgacattacaaggtgaaaattcagttcccagttctgctgataatcttcaggtgtttcaagtatgaaaaactcaaggaagacctgtcttgctttaagaagggtttcccctgttggagagagagagagagagagagagagagagagagagagagagagagagagagagagagagagagagaaaatttttaaactaaaccagtcttctttccccagtctatctgtacattggtgtaaagacaatctaagctagaaaattagaatcacccacttctccatcccatggcgagaaagctggtgcctggtttagggagaccagtcttggggggtctaagggctcagtggggaggtagctctgggagaccacttggttctaaggagggaacactatgatgtgcttgtgtggcctgcctgcccctggtgttaggaatgaagtccagacagacatggtccctgaagcatcctctctgaaatctttcttgattcatccaaagtcttatctactcttccttgcccaagtcccacctctgttggcgtggcaaccaacaattagaagggtagatgggtaatctgcacacgaattgctcctaagagaaaacagatttctgaatccaaagaatgaaatacccttgaagcacaaggcacttggattttttgttgcaaacagttcagctacagaaatgtctatggttgtcggatggatcagcaagttgagcctgggtctcagtccagcttaataccatagtaacatagagaacaattattgaaaccttccatccttcgaatcacgggctttaagcagagggctatgctggtcatctggaaagagggaaggaattactcagatcatattgccctgtgctcattgtcttggtgcaggagggcccatcccctgtggctgacaccacataggcaggtgagtcagatatataagaaaacttgctgagtgttggccaatgactgagccagtaagcaaatgcaactgactcctccatgccctctgtcccaggcccagctcgagggagtccctgttctgccttcctccagtgatgggtcatgacttggtatttgtgagctgaaataaacccttttgtcttcccaagttgctcttgttccgagtgtattagtgcagcaagaaaataaaactagaaaaaatgcccaggtagaaatgttcaataaatgttccatttaccttcaccttctcatgcccagtttgttaaatagttgcctgccttccagcaaatacacattttagcaggaaggctgacaacccaaccaccatcacctgcaccttctcatgttgatcggtgcccccctccctccttcctcctcaggctactaagtccggactcacctttgtccccacttgccaagttgcactgaccccattattgatgcaatacatcaaagctctgctgagcagaattttttatgtggataattcagaccccagcatctcagtggatgaggttacggtgattaacatcctaagtttgtgcagccttgtagtctagcctctggtgcatccgtaatattctcagagggagtgtctagagagtccagggttcctttgttcttcttgactcatagccagctgctagagtgcggtggagggtttatttttggttttgttctgttttgtttttgttttgttttgtttttgttttagttttgagcattataagatgctatgtcttagttaaatgctacgagtggtgaccaaaaatatctccagaaactgctgagtttcccctcaccttcactagtgggaggggatgcagggacgaatatcacttcactcaggaggaactcaatgacattttatggtttgcagtgccatagggtgggtaaaggcgggtcaagcacgagaacagccagctctaaggatgacacagggtagaattcagatttacctgcataaagtgaataaatacgatttcaataccaagtgcaagcctttaatctcagcacttgggaggcagaggcagatggatctctgtgagtttgaggccagctggggccacatagtgaattttaggcctgccagggttacatagtatgaccctgtctagggggaagggggagaattgaagtatagaaatcatttcgagaagaaaaggccacatcaatattccctcacggatggaatagtggctggtgacagccccacccaaaaggaccataagcggttaatggttgcttcagaggaggtagtcttattcctaggtggtatagcactgctaagtcaccattgcttgtgcaagcaatcataatgaaatgaagtgggccccaagacaaataataaaaatggtaacaagacaggagggagggaggcttgctgggaaggggtttggtgggaagggaaaagggggaggtagatagataatagggaggagcagaatgtggactttgaaaacagaaggcaggcagagccatgctgcttgctcatggggcactttagagcagataagtgcaattatgggcttgctttcatcactaaatgaggacgtctcctacaggcgattgcacaggcacgccacagaggtgtagaggctcaggacttgtcaagtgaggaaaaaaagtgaaagtttttccaaaattccgagacgtacacaattattgagaagcgttgtgtcatgggtcacaaaacatgcaggaaagtcagagccactcctgtccaggcaacagaggagcccggatctacaactgggttcctcgtccgatctccagaaggtgcctgaggcttaggagccagaaaaagactaagaatgtcatcctaaaattcctcacagttccaggctttttatgaacctgtatctgacaggacttctctagaaaaaggtaatattaataaagatggtgtgtactttgaaatctgagagttgtcaccctgtttcttcattgtatataatgagccagagataacatagggaaacttggcaaatacaaactccctccttcaggggtggtgtagagagcacatggcatgcctctgtcgcatttttgtggccgtcctggtcattccttctctatgatctttacaccaggactcttaagtgctcttggggattgtcatggccaagacagctgcctgcacttcaacctccttctgcacccagagttccaagtccctcctagccgggacccaatgcccccggccccttttctgagctgcttgtaggtttctgacatttgaatcaagccatcctgcaggatcatgcctgtgcttactcagtgagcccatccgtcagcatttcctgtttccattcatgctgtaagtgaaagagctgtaacaaagagattgccaagacaaatcatggctgaggcttacacaaataatttttatcacaagcctcttttaaataggcagccttccgaaacctgcattccacgcttttcaggaaagccaagtcatgctaagcaaactcgattcatgatttaaggctatgtctattaaattcaatatgagattgatctttggcttggctcttgaaccttctactagggatagcaagtaagataagggaataaattgcttcttttaggtcaccgtggaggttttaacttgttggtcattctcaggaagtcgtgaggaagtgaaacctacaggaagagcaacttgtcctttctcacaagggtgggcttcttatcaaggcccatggggtggggctaaccctgcagtcgtcaatctccaagttagtcactgttggtgccttagcaaagcgcttcttgctttactttagtaaaggctgatcacccatcagctcaccttctcccttggcagcctgcagcctggagacaaatgaccttagaatggtcacgtgctcagaaaacagagcggctttcaaagcctgggaatctggctcttccgtttcctgcacagcgttttggcagctagccttcccagccgccgcccacttccttcccctagctgaagctctcttttctccactcttgtttatttccagtttgtgtcttaaagaacggaattgatcttaatttctctatttagacactcgaggcgatgatctcattcattgtcagatgcgagtggcgtttacaccattgcatctaggattaaaattgtcaaaacagttttgtaaggaagaaagagggtaggtaagacagacatggttttcttcctatttttaatgtctgtcctgttgagttgtgacctttgcatcggctgttgaatcgcacgctattcgtttatgcacttttatgtcagggactgtgttaggtgttagagacagacaagtaaggctgtcctctcctctaaggaagagctagcagactgggctcatgtggatgcaaaacttgggaatgggggcggggaaaaacaacagcagaggtggaagatgcccacgaggacaagaagggaaattcccctgcctgagattcaggcaacctcctaggatgtaagcccttggactggggtttagatgctgtgtctaagaagcagggaaggaaagaaaggaattttctgggtgggaaagaacagcagagatgatagtaatatagtagggttgttttaggaaacttggtagctagatgctactacagaatgaggggtgtgtgtgtgtgtgtgtgtgtgtgtgtgtgtgtgtgtgtgtgttcctgcatatgtgcatctttgtatacatttgggatgtgaatgtgtgcagaggtcagaggacaaccacaggtgtcagtcctcaaagtgtcacccacctcacccttcccctttttgaagacactgtcatataggtctgaaactgaacaatgaaggctacactggctgcctatccagccccagagatcgacctgcctctgccttcccagtctgggattataaacataagctaccatgcctggctttttagaacatgggctctgggaatcgaactcacattcctatgtttatgcaaacattgtaccaaactgagtaccttccctgcccctgaagtgtggggggagacagagcagggatggtttacatgagcaaagctttaaggcttcatggtaaagatgatcagaactttttctccttaagatgacagcaaacttatgaatggaggagagtgaggggaccatgctgagagttaagacagcagctgatactaagcagaggagtggttataaaagaaatcctgtttctctgagtaggtatctgaggacttggtatttgtgttacttacttttcctgctgctgtgataaactactgagaaaagcaacatcaaaacaaatagttcttctggctcccagtttgaggctgtagtccacacggtatggtgggcaaggctggtagcaggagtgggtggcattgcatccacagtcaagaagcggggaaagagaaatcttcttcttagcccaatctctctttctctctgtagtcctcacatctgcagcatcctagaatcgcctttgcatcttaagctttatcttcacagcctcctcacagtagcctctcaggacctccttgcaggggagtagaaatcacttctaactttgcccacaatagatggagtcatgagaatggtcccatctgccgtgaaaaggaggggtattcttccaattgttctgctataaatctttgcaaagaaaaattcgttaaaaaaaaaaaattcagggagagcgaagctatgaaacctatccttttctatagtaagttaaaacattaatttcaaaccataaaattgacttgtcaaatgcgtatcagtggtcataaaagatgttttatgtctattgcccgtatccttacccctggaaatttattctgagaatatactttgaaagagattaaagctcatatgtagcacaaattcagtgtgtctttctacatgctggtgacggcccaattgttcagtaacagggggactgttttacagattttgtcaccctaattaaattatatactctgtttttgtaatcacaaattctaaaaggttgtagtacagaaataaaattatacttttaagataaaggagactatagaattatgtgtattctataaaaataggtgtatggaatgctaaaagaaaaagcaagaattaagtgtatatatagtttaaaataacatctgaaaaaactatttccaccagttcttgttgacatttctatttcccatgaatcctagggctacatcttcatttgtttgctttttcctttttttcttctgtagctgctgagaatttgaactcaggaattccctcatgcaaggcaagcattgtgctctccgccttcaacagtaacctttaggatttttataagaccttagtaaataaattcatgtacttctacttcctatctgtaccattattatggccttagtcatattgtcagtagatggtccatattccaaaataatttttacattagtagtattcttcccaaatgataatggacaatcactgcacatgagtgtcttgttaaaatactgaatctgttggggctgtagaattaagagcactggctgttcttctacaggactgtgtctgattcctagcacccacatggcttagaactatctgtaacaggggacccatggtctcttcctacctctgcagataccagacacacaaatggtacacagatatacaagcaggcaaaacattcatgcacattaaatcaattcaaagttgttgtttttaatgctagttctgattgagtagatctcatgggtccaatagtccacttctttaacaaggtcttaagagatgctgttgcttgcttttgctccatggatctcacgctaaataccaaggccctggagctctctcttgagtggaagacaatactattgacccagtatctatcgtggttttggaaagcaatactcaagttccatctgtcacctccacaaatagcacaaaagccacgtctgagaggaggggaggtgcgggtttgtatatgtgtgctcatgcgcacacagaggccagaggaagacatgggatgtctgattccatcactttctaccttcttctcttgactcaagatctcttttcaatgaacctgcagctaggctgttggccatcggaccccagcaatcttgtctccccacacacacacacacaccccactgtgctgaggttacaggtgcacacagccatactaagatttttttcatcaatgtggagatttgcactcagttcctcatgcttgagcaacaagggttcgctctcacccactgaacccccacagtaccatttctgtcaactggaaagaagtctaaaaaaatgaatatgattctggaatccagctgccacctttctcacatgccctgatcagtatccttaagccatgcctccaacttgaaatctgctcaccaacagaatggatcaggggcccaaaaataagaaaggataacgtatgcttgaccctttgataaagtttggagcacatcttccattatgagggaggtgccaggtcacctctatgtaggcatgggatacagcaccttgtagtggccttgtgtggcaggggtaggggccgttgtgagagcttgtacttttattaaacattggttgctgtgttctgatgataagagctcattccctacctgtttctgtacagtgactgaagctggctttggggctgatattgggatggagaaattcttcaatatcaaatgccgagcttctggcctggtgcccaacgttgtcgtgctggtagccaccgttcgagctctgaagatgcatggaggcgggccgagtgtaagttcttgttttcttcctagcttaaaaaaaaagccgaggagtggagagatgactctgtggtaaaaagcacctgccagtcttagaggtcctgggttcagttccaggggaccttacaccctgttctggattccacaggcacctgcaaaatcacagtgctcataaacatacgggtttcgtgcacacataacacataagtagttaaaacatttaaagccatatatgagctgtagaattggctccatggttaagagcactcactgactgctcttccagaggccctgggttctataataaccaaatagtgtctcacagctctctgcagcttcagttccaaggggtctgacaacctccatacaaacaaacatgcaggcaaaacaccagtgcaagcgagcgagtgagtgagtgagtgagtgagtgagtgagtgagtgagtgagtgagtggatgaaaagttatatgcatgtatgtataatttgaaatgttctcttcctcttctgccatgcccacatttaaatttaaacagctttgatcctctaaaaggtttaaagtctgtttggtctgattggatctttataaaatacaggaagaaatcttggagacacatagagaccagcagtggtagcatcacacctctgctgaggaaactggtcagacctagaattgagtccagagtttttccagacctccagactataaaaatacctggcatgatgtccagtcccactgcacttctccttgacgtgtgcgccatgttgccacactgtgatttcttcccagttattcctttctgctctttccttcccttcttaatcctgtggttctttggcaaagaagataacacaaggttagggaccataagtagaaatgtcaatcgttaagtcagttcccattaccaaaatgaatacctgatactcaactcataaggagatgcgatttattttcactcacagctctgtacgttgtaatcctctggtcagcatttgtacatgaagcaaggcagtaagtatgtcaggctgggagcccaggacaaaacaaaactcacctcctatgtaggggttgggcgcaggggcaaggctccctgtatttcccctgacagctcccattaggcctctccttctaagactccaccacctcccactatgctccaggagagcatagcctcataaatgtctggggaacattgaaggaccaaactgttgcatgaatgaacaatagtaaccagggagggctgtaaaggctgggcttggcctcatggcattttatgactgtctctcctcttcaggttctgaatcccttgctctcaggaactgtctaattagttactgggccccggggcctggcatattccatatccagaaaatgttttcagtaatggagtaacaaatgaactttgatcttccaatccgacgtccctctgaattctcatcacccacctcgatgcatttgcctcttacttgaaacagttccgtggtgatatttttgattcaggataatgtctgcttctcttcagcaacattgcacacatagccacagctgcctcgtgtgtgttcactcagctgaggtttgcattttttaatccattatttgagcagtggaaaatcctgtgacctttgaacctgcccattttaacacagttctttttctcgccactgtgacctgatgagaagcagcttaaaggaggaggggctggctgggcttacaatctgagaccacggggtaggggccattggtgccaggaaggaacagtgactggagcatgagaaaactgtcttagttagggttgtacttagttagggtcagacaccatgaccaaggcaagccttataaaggacaacatttaattatggatggcttacaggttcagaggttcagtccattatcctcaaggcagagcatggcagcatccaggcaggcatggtgcaggaggagatttcttcatcttcatctgaaggctgctagcagaatactggcttctgagacgtttggacaaagtccacgcccacagtgacacaccaacaactccaacagggccgtaccttctaatagcaccactccctgggctgagcccatacaaaccatcacagcaaccaatcacacagtctgcagtaggaagcagagacgattcttgtatcatcttgctttgtgcttttgtcatgggccccagcccataggatactgctgcctccatccaccataggacttcccttctctctggaagcaccctgacagacatacccagggctacttctcattaatgccctgggcatttcctaatgcattcaagatgacagtgaagattttttttaattatttttttttacttgttcactttacatcctgctcactacccctccttcctaaccacccccttccacagtccttcccccatcctcccctccccttctcttctgagcaagtgggccctcccctagatatccccaaccctggcacatcaagtctctggaaggctaggagcttcctctcccactgaggccagacaaggcagcccaggtagaagaacatgggagagcccacacttgagttgttcaggacccacatgaagaccatgctgcacctctgctacatatgagtggagaggcctagatccagcccatgtatgaatatttaactgctatgccactggcattttaaatccgtagcctgtcttccagcacactaaccgttcttggtgcggtataagaactgacattcgaatattctgaatctacacaatcttttcccagttaaccctttaattgcactacagtaatcaggtttctcaggcagcagaggtcactgggtgtgtagatgtgtggtaggaggtaaaagggaataaggaaccaggtcacgtgattataaagcgtgccagtgcagaatccaggatctacttattcccctgggaactcaggagccatggcttgtgtaggtccagtccaatggcagtctgatggaaaagtctccttggcttagaggaggccagtctatgttatatatccataaatcagtagatctcatcaaaaattatccttacaaaaatcacatacaataatgcttgaccaaataaatatccagataccctaaattctccacaagttaacacttggagtaaaccacgtgttttggagtgtagggcattgacaaaatttaatatcaaattttttttttgacccagggtggaatgactgcattttcccaaatatgtgcaaacctctttctgggatctcccttcagttgagctggcctagttaggtctctttgtgccaacgtactgcggagatcccaagccaggctgttccttcacatttgacctacaagtgacccttttcaaggatatctgcattttaccaatggacttattttactttttgaggtttgcagtatccagcctacataagactagctctatttcagtgaactacaggctcaaaaccctgtgtgtatttgagaattagcttataggttctgcagtctctttgggatctctattcaaaggacgttagacacctcttcatagttctgtttgaatatattccaatggaagttattgcttattacataaagatcttctatatcttcgtacagatctgttcccgtatatgctttctatctttaaataacagattatttctgtttttatatgttattttgtcactatcctgtctgaattcacttaattgtattgatttagcctaccacatctttgggggattctgggctgccattcattgctcaaaatgagttcctttttttcccttccagtctgtatggtttcttcccttgtccctggcaagggcttccctggtaattgcaatgccgtgttggatgtaggcgtcttcttagtcctcatcttcaagggggttgtttaaacagctcattgctgagtgcgtgcaaggcttgggatacatttgtaatgaggcctaagggattaccttctatttttaattggccaaattagcatagaaactgatgcaggcttttcttccatcttttaagatgacaatttgagtgttctctttgagattgtaaggcttgcttaaatttgtgccttgccagaacaagcctggtttaggcagctatatctgctttacaaataactggattttactagtcagttttctaatgttttgagtcgggtctcccctcccgcatttatatgagtaagatgttagatatacaaaaattaaaattttgaacttttttttcttaactagggaaggtttgtgtaaaaattacagtacttgatttattcaaagttgagtagacttctccttttaaagcagacctattgctatagggaagaacttttttttttcctaattcgtaggatggatcttaatttctgtctctttatttcaggtaactgctggggttcctctcaagaaagaatatacagaggaggtaagaagaactaatggtccagtgcagccagtgagtagcttccagttgactgtccgtgagtgtacaacttagaaatgtacttctctggacggaggagatggctcagtgggtaaccacctcgcaagcgtgagaacctgagttccatccctagcacccgagtaaaaaacaaaacatagtgacaaacacttgctttctcaacgctagggaggcagagacaagtaggtctccggggctcgatggccagccagccttcttcatgagctgtaggccagggagagactctgcctccaaaagaaaggtacctgaagaatagccaaggttcgccccacatgcgtgcgtgcatgcacacacactagaatttcatttttaaaaagtcccatgaaaatggatgggataaaaggatgaaaccctttcatttaactcttgaagctgaagaaaaggtaaatatagacttatttgctgtcctctactcacaagacagctatccgagcccagagatgagggaagcttttacctatgtctccttttgttgtagcaaaagttgtctcttgggagatgcacacgtgtttttatgacttataggaatgcaatcagtatctgtcctgcagacaaactggttagatggtgacagtaccacttagctcctacaggtggtgccatgggtttaaaccagaagaggcaggaccccttcagcatcccggggtcttttgctccctagctgcagagagtgggcttgcctacattctgttagtcttacatagcagtagttgcctggccccagtctcagatacatgtgcttggacccagaatagttttagaacctaccttgaccatgaatcacctctatctgtaatcatctttcttggaaacacaaggtgacttgggtctccttttaaacctgtctccggcaaagaaaagatagaaacaaaagttgtcagtgtggtgaggctgggtctagcttggggtgtgggggggttaggtaagacataatgacacagctgctggtggtttccttccagaacattcagctggtagctgatggctgctgcaacctacagaagcaaattcagatcgctcagctcttcggggtgccggtggtggtggcactgaatgtcttcaagtgagtccagctttctgtgaaagacacagaattcagtttgtttgatttggtttcattttccccaatgtgttctctagtgttactgtggaaattaaacacacagagtcaatgagcacctgtctggttttgggggagggggtattttggtttttcctgttctacccagtgattctgtctgatagactgaatgaatgatcaaaaggaggtgttatgtaacttcttgattaaaaacccataataaggttgggtgtggtggtgcacatacctttaatcccaaacgctccagaggcagaggcagacagctctctgtaaatttgaggccagcctggtactacagagcaaatccagaagagccaaggtttacacagagaaaccctgtctcaaaaacaaatcaaagaaaacaacacttgagtcatgttaaaggggattctttctacatgctttttcatcgtgtctgatttatttaaacacgtgaccacttttgatgttctcaatatattcagtgttagggagtgaagttctatataaaccgttagtctttctctcaaaacatcactaagtgaatacagatgcagaatccacaaacgttctcatcaccaggacggacacccgtgcagagattgacttggtgtgtgagctcgctaaacgggccggtgcctttgatgcggtcccctgctatcactggtcggctggagggaaaggatctgtggacttggcccgggctgtgagagaagctgcgaataaaagaagccgcttccagttcctgtatgatgttcaggtaagtcgcatctaccagtggagtggcagctctcgtatcttgtagaaggccagcgcttaaagcactgtttatatgacccatcttatgtggtcttcttggagattcaacagtgaaggaagctcatgactaaaggcgttagccatctgatgtgcccttctgctttcaaacattgggcccaagggaggggatggctctgggtgggaagctatgctcacagggattgaccttccaacaacaaggcttttgaacagtatcaaagctactcaattacaaggcatgcttcttgtatctcctatggttcttttgtgtggtgtgtgtgtgtgtgtgtgtgtgtgtgtgtgtgtgtgtgtgtgtgtgtgatatgtgtggccacacacaagtcacagcatgcatgcaaaaatcagaggtcagtnnnnnnnnnnnnnnnnnnnncatgcatgcaaaaatcagaggtcagtttgtgcaagtcagttctggcctcccaccacgtaggttccagggatggaaccacgagcaggcgagactcagcagcaggcacctttgtccacaaagtcatctcatcaaccctcacagtggttttcttgcccaatatcttacatagcttttccttgtagtaaaatatgttaccatttacaaatcgtgatattgagtacattcacatcattatgcaaccggtttctagggctattctcatcttagaacactgaagcttggtatccatttaacagtcccccacccccacccccccttccaacagatccttcagtgaaccaccatcctactttatgtctcagaatttgactttttagataccgcttatgaatgtgatcttgccaaaatagtcgtttcttttttatctgtggcttgtttcacacagtccatggatgatgtcatagcacatgtgagaatcctcattgcttttaatactggatattgtctttactacgtgtatgctctgtgtgtgtgtgtgtgtgtgtgtgtgtgtgtgtgtgtgtgtgtgtgtgtgtgtggtgttgggctgtataaccagcaatgggaatactaggttttctggcgtggtttctctctttctcatgggggcaggtaggttttggtgtttggtcttctaagacaagctctcctataatcctggctgaccttgtagctaagggtggccttaaatttctaatccctcctgcctctacctccttagttcttggattgcaagcatgtgtcactatatctagccttataattcatttttaaactaatgttggcactcagccttggtggaagaggcacatttgggaattcaaagttgatctccagtccatagtaagttcaaaaccaatggttctgttgttttggttttttgagacagggtttctctgtatagccctggctgtcctggaactcgctctgtagaccaggctggcctcaaactcagagaagagatctgcctgcctctgcctcccatgtgctgcgaataaaggctcgtgccaccaccgcacagtcagagctacatgggaccctgtctcaggaaaacaaaaatctgagttctacaaagcttgacccaccccacccccactctcaaaggagcccttcctttttgtatgtgtgtttcacttttattttaattatttttctttcctaagtgtctatacctttttcaaaattgtcatatgttgacatatcagagctgtatttatttgtaaggtacataactgatacaccatggacttcaggcagggtcccgttagaccacacttccctctctgtgaggctcaagagctgtgagtggaatcataggaactcatttttgcaaagggatgaccctgaaagcaagccttgctctctccattgagagttaacatgaacggtcctccggtgcccttcctctgagtttacacacattttgaggtgcgaccttcacagcggggcaggctcacatttgtttttgttaggtctttcctgttacttatgtaaaaccatagagcctttctctgagttgaaactggggctgcatgggaaaaaaaaatcaaagcacagccagccgtgagtttatgacctgggacagtcacagcccctcccctagtttaggcttggtttctactctgcaagtcattttctttttttttttttttttttttttccgagacagggtttctctgtatagccctggctgtcctggagctcactttatagaccaggctggcctcgaacttagaaatccgcctgcctctgcctcccgagtgctgggattaaaggcgtgcgcctccacgcccggcgcaagtcattttcaaagcagagtgtattgggggttgttattgttgttgtcgttgttttgggggtgtttttctttctagttggttttgagaaaattacttcatttttttcttcaaagattcaaatttgaatatattccagttagatgtggccactgtgacttttcttgtcatcgaaatttaaggcatttgccaccagatcctcaaattttataggcataaatttaaaatacatgtatgcatgcacatgtgtttacgtctatgtatatgaagtagggattttttagagtagaggtgtgattaattcaaagtcatttcattttttaaatatccttagggttttacatacattactgtgcatatggggttgaatctgtagaattttaaatcttctctgtatcttactcactttgtagccattaggggagtggggggagggacatactcaatgagaacaattacgagccccttcttattgtccatgtccctgccccttctctgtcctctctcccttggtcacctgtgcctgcatgccctttgccctgtttctccttcctcttttgtaggtcctgggccctttgggttgtctgtgacaagctgcctgcacatgtcccattgagtttcttgttggtgactctgcttttctcacttctgtgttgttttcttcttcatttcttatccagcatgagctgccttagcagagatcggtcttccatcctgcccgtcaccagcctcctccaagtgattcatacccagttccccacaacaatatccagaacagatcttgcccaactctcgctctcctgagtcctcctttgacctgcatgcacctccatagcccacccagtgcatcattcctatgtgcaaaatggccacgagagatctgagcctcactcgagagtcaccctgacttttgaagcgtccccttcactgtcccatttgccccctcccagccctgtctcgccgatgaaagaaacagcatggggggggggggggcagtgtgtgatttcatttacatgccctgtgaaaaacggaacatcattgccatggaagtttctagaaatgcattgttcccactaacactatgagggaatctccagtggcaagctatggaggttccactacaagttgagaggccaccatccacctcatcctattcttgcaggacgatatcatagtaccctcgttgtagcctcaaagtggaccttaaagataccaaatattataaaatatatctcaagagaacagttcccttcaggttcaggggtgacatctcagtggacatgaaatagctttgctgtgcagttaggagagtctaacaccaaaaagtacccaggctccttgaacatgaaagtaaaatgacttgtgcttgcactcttatgcgcgcacatacacacatttccaaggaggtttgtgagacacgaagatgatgcatcatgaaaatacccgctcgggcaggcatggtggtaatcccaatactcgggaagctgaggcaaaaagtgaaaagttcaaaaaaaaaaaaaaagggagggtgggggggccaagtaagtattggtagtccctacagagtactgtttgcgagtaataacgaaaaatattacccttgcacatttcttattttcagtgacgaatgcaggttttctaactatgagacatctatttacttcccagagcccagtcactgttgcccgtcacacatggcacttgccttggaaagatgtttctcaggggatctcaagtgaacctgctgctcagggtggaagctcagggtccaggctcctagaagtacacgctcacccctaggtagctcactgtgcttgtctctggtgcacagtgtgctttgtgtcagagatacagacccctgatgtccctggtaacgatgacatctgttcccagggtaccaggtagtacgtgtgtcgtgcagctcttgtacctgtgaggtctgatcagtgcaaatgaacatggttggtttccagttatatgtctgtctgggttaccagaaagggtgcctgccaaactacaagtccgtcatttaaaattcagacttcatttaaaatacaaactggagtaattaccatgcacctggagatttatatctgacttgcaagttattaattgatccttctctttgaatattttatgggcctcagaatacatgacttcagtatcacagaataaaaatgattaacctatgtgctttcagctccatggccttggagacacaaaagaacgctatcttttattcagcgcatctgggatgcataccaatgactttatttggtgcagagctgaaacaatagtgcggccttgctaagatatggtcagggttaggtagcagaatactaggtagtatttttaatcaatcactcagaagggattttttttttccaagctgctaccattagcatctgatctccaagtgagcagaaacgtaaccatttataagccattggcttggttttattatgttgttttacatttttctccctttctttctggcgtatgcccacatgtgtgtgtggccacaggaggggtccacattcccatatgcacttgaaggacacaggagaacgttctagtccatcactctctaccttagtgagcctggagttagactggcagccagcagactccttcaacctttgcctctcatagcactgggtctgtacacacgtgcttttgacatggatgctacagagtcaaactcaggtcctcacacctgcttagcaagatctcttggccaccaagacagctctccagccccacaaagcctttttacatggttatttctagcagtcttgttttttaacctttagttctgtttcactttgttttgttttgttttgttttgttttttaattttacgaaagcattattacacctctcccaccctgtgctccctctgaccctgcttatgctcccacttactctctctaattaatgacctctttgttcttatagttgatgcatatacatatggagggatgcatagatatataaatcctatcagctgagtccctttttgcttgtgtgtacatggtttcaaggctggccactttatattggataatgtattaaagggctcatctctgagagaagctatttctcatctcagtagtcattagttgcctgagatttttatctgagggcagaagtccctcatctcaccctccacattcgaattgctattaaaattgttatcgtttaggcagccattttgaggcaatacggtctcacaggaatgtctccatcttctggctcctacgatctttctcctcattcttctgtgatgtttccggagccttaggtacaggaggtgtgtgtgtgtgtgtgtgtgtgtgtgtgtgtgtgtgtgtgtgtgtgtgtgtatgaatgaatatatacatattcattctctgggtttatcctctggggctgggtccccacaagccgttaacctctgtgttggggccagttgttgttttctgtaatgggctgcatttgtctgctgaggagggctgagagctatactcccctgtggttataggataagttttagtagaggtaggagtttgctggtctggtaaagtacattctcctctgagatccaagatctcacgaggcctggataattggtcaggtttctagtaacgggcgtgatttccctccctttgagcatagctgtggtgatccaggctgatagaaatattattctgaaaagattctgaaaatactcaaagaagctataaaatcaaactattgaaaagcgtgtctttttagtggaataaagcagccaatacacccccaaaagtttttacttaacctttgtacatacttttgtgatacacacacagtctgggcatggcggagcgggcattcaacccagcactggggaagcagaggcagagctctgtgagtccaaggctagcctggtctacaaagcaaattctaggccagccagggctattcagtggtattaacgtgttggcagtcaccaacagctgtctaattgtccttaaaggtccacggctgtgtgggcccaggctccttctgccttccacttcctgtgcagtcatcattcttccttctgcttcttgagatctttcttgtacttcctttaggacaccgtcaaagttgtttgggctttgttttgtttttccatactgggggtcaaccccagagctttgtgcatgccaggagaatgctctgccatcgagctacacccttgggagtttcctttaatgcctggccggcttttacagatctccatgcaatctgcccctcctgactgtttcatgtttacccagagccttgactgtcaggagtgtctctccttcccacatgtttattgtgccgtggcttgcactctgttaggaattgttacacgaaaggtccccaaaacttgtgcatgacacctcagcactgcaaaagtactttccattgatggctgttttcatatttagcacaggcttggacaaggcctactatgtgtgagccactctgctagacatgaggcctaccagaggaagggaataaacagattcatcccctgtgcacacaatcaggggaatgctgataaaagaataaacactcataacttactttatcattttatttgtttttataaaagctatcatttgcctcaaagcagcttaagtgaatcttagttcagcagaagatcacttagactggcttgcccccaaagcgtgtaggcctctcttcacaaccaagcaaggaaattatagaaggttcctttgctgaagacacagagtacgcacactacccacagggagggtagcgctcatatgggactgttttcacactaactctaagcggtaagctaactgagatgttttcatttatttacttgttaaacactgtaggagaagtctttcagaaccttggcctggggcttccagctcagtggattggagtgcctgctgaggccatgcggctgtgacagagagaaccagaggggaagagactatcccaaggcttacctcttcctgttttgcctcccactatggactctgtacgagtcccatttagtacaggtcacaaagtcagcctggcacgggagtggtattcccaaagcactttccagtaaacactagcgaggaagacattagctatcagcaaaagatatccgcacttgtgctcacagaaggctggagtggtgctgagacaggaaacatcgggagcttagcagagatggaaagatgtataggaactgcctgcttagggactggggctcctatgattgccgtcctccaccagggtatggtccttgttgtgcttgatgagagaaccctttcctgctagaaagatcttctatcatctcatgaaagctttatttatcttggagtggtatgtgctgtgtctgtgtttgcacgtgtggagggcagagaacaaatgtgaggagtcctcacgttgctaccatttgggtcccatggatcaaactccaatcgggcttgtcgacaagtctctttacctgctggctctggctccacgatacggttgaccagcaaagacaatggtggtagcttcggtacagcgcctggagcaagctcttctttgcgtgatgatgtgctgtgcagacgatgagattgtcagttcatgtacaaagtcctctgtcactgtcaccccagcacctcctcacctgagctttcctttctcttctggagcttgtgcttagctgacaggaaatgtgtagtcctttgctcaacagaacactaagggtagttgcccccatagccgctggagtaactttggtaaatatatggtatgattgctaataatgtcaacttgccaggatctagaagcacctaggagacatacccctgggcgtgcccatgagggagtgtctacattgggtaagaccacccaggctaactgttccgtggactggcatcccagactgaataataatgagaaagtgagcttggtgctcgcatccgtggatcaaatgatgcactccatcactgtcctttcctatgagagaatgtatgccctccaactgcaagccaaaaggaaccctcccttcctgcttcttttcagatacttagtcacaataataagaaagtaccactgggcagtggtggtacacagctttgatcctatcacacaggaggcagaagcaggtggatctcaaggccagcctggtctacagagcaagttccaggacagccagggctacacagagaaatcctgccttgaaacaaacaaaacagagggggtggggggagaagaaggaggaagagagggagagggggaagagggagaaagatacatagatagatatatagatagaatagatacatagatcgatacatagatatataaatacataaatagatacatagatagatacatagatggatgggtggatggatggatggatggatggatgatgcttgagaaaagtatgtgctacaacccttgacctcagagacctgtagcccatctttactcttcagctaacattagctttaagctgtgtatgttagaagtgtgttgagcttcctgccatagtcctttaatctcagctacccaggaagctgaaacagagcttgcaagtgcaaggctagcctaggctacccataagttcaaggccaactagagcaatttattgaaaacttgtctgaagaaaaaaagaaaaagaagagaaaaggaaaaaaaaaaaaaacagggtaggggctggggatatagctcagtggtaaagcatttgtgtcctgggagcaaagccctctgttcaattcccagtactgaaaataatggcatcctcaagcttatgtctatctgcatttgtgccctagctctttatattaacattcccacgccctcccaagtctatgcccacatggcagctgcgctaagtgcagctcagacacagggatagaaacgacttccctgacctcttgcttgtggtccacattctgccctgctggaaagtaattagcaaataatagttagttgtcccttttcagagatgaactttcacatgggatttctcatgtgagagttcttcatgtggtttataaaaggcaccttgccagccagcagattttaggattaaagttacgtccagccactagagtctattggtacctctgaatccatcggtactttccaaagcagcatgagccttgccagcagcccctccttcagggaagaacactacaggtgctcccaatgtcaaagaagggaaggctaatgcatattaatactgtccctaatgccgtggttctcagccttcctaacactgtgagcctttgatacactttctcgtgttgtggtgactgtcagccataaaattatttcattactatttcatagctgtaatctgctactgttataatttgtaagaaatatctgatacgtgaccccctcccccaaaggggtcatgacccacaggttataaactgctgcccagtgggagatgtggcctttggcatagacctgagagctttagagagcttgatgtttgaagaggacagggaaagagatttcatgagtgaatcccagaaggaagaaggaagcaaagacatagggtgcagaggctgaaacacctcaagcagggttgtctcttggcagaccttacagtgctgtagtgctgggatttttcttgctgaggtgtgtattgggaaggtcggacttgcagtggagactgttcagagtaaagagaagctacctcagtggtgagccagttggtgccctccccaaccctccaactgctgcgagaacgtgtcacgtcctgcctcttcccttgcaggtggcatttgatgagtaggaatcagggttcgtatttttgtggccagtgtggtttgtttcttagatgagggtgggaggaagagggcttacacgtgcacacaggtgcactcacccatgcatgctcccctgaaggccagaagttgaccttgagtgtatttcctgtcaccttccagcactggtgtgtcttcacacaaaccacagggtggaagtcagaagatggctgcataaatggtcctctcctcccaccacatgggtcctaaggatcaaactccggtcggtcgttgggctttgcagcaagctccttcacctgcttagccattttgccagtcctctatcttgttttttcagagtcttttgctaaagcacaggtcgctctttacctaagctggcagatagactgagcctgtctccatgtccccagcactgatgcatcagagccataattgtgagagctggatccgaacttgggtccttgagcttgtgctgcaagctctttaaccacacagccatgtccctggcccacagcttttggtttttggtttttatcattttaatagctattttcttgattactagtgagactattttttatgtagttattagtttttgcccattattaaatgcctttttatagacattcaaaatttattttagtaccaatcttctggcttttaaactatccaaatcaccaggcgtggtgacgcacgcctttaatcccagcacttggttggcagaggcaggcgaatttctgagtttgaggccagcctggtctacagagtgagttccgggacagccagggctacacagagaaaccctgtctcgaaaaaaaaaacaaaaaagaaaaacaaaaacaaacaagcaaacaaaactattcaactctttatcttctctcacgtacctgtatccctttactttctaggttttatgtttgtaaattcagaagttcctgggtctgatgatacatactcataatcccagtgcaggggagcctcagtcaccctgcctcaggggaaaaaaacaattgttttaatttcatgtattttatgcgtatgcttctccaaacatgtgtgaatgtttctgcaccatatgcacgccctgtgctttcagaggccaatagcggatgtctgattctctgggactagagtcacagacagttgtgagctgcaatataggtgctgggaatggaaccccggtcctgtgaaagaggttcttaaccactgactgaaactatctttccagtccctagggaaaaattatggatctataaatcatttcttttgtgacttattctggtatgtgtgtgtgcattggtgtaggggtataaatgtgagtggattgacagggtttcacgtagtctaggctattcttaaactcactaaatagtcaaggcttgactatctgtgaatctcccaagtgctgagaatgcgggcatacatgacccatgtccaaccttatgaccttctgttgctgccatctttaagaaacccttccctccattgggaagacagaatcctgtgatatttagagtttttgtttttaaatctctcccatattagatattttgcagggagagggcctggtgtggttttatttctttctaatcaaaagtccactgggtcactgacccttccttgtctgttataactacctcatgtctgtggcaatgcccttcccagtccgttcatctcttcctgtgttgttatcacgaggaattgactaatatagttttgaagtattgttgatacttgatttgtgccatgactctctcttccttatgtattttatagccagttggtcacattccagagtcccaggtgctcttgggttttcattgaaattgcataaaactaataaagtaagttataaagagctgatgtgtgaataacactgagtctcttcattcatgcgcacagcattggtctccaccacttatggtcctttctgtattctccagtgaaagcttacaaatacatgcacctgctgtgtatggtggcttgtgactttcatacctgcactcaggaagcagaggcaggcagagctttgtggctttgacatatagtctgcattgcgagttaccagtccagcaaggactacatagtgaggtcctggccggaggcgtgtggcagcgacatcggtgtgggggatggagggacctacattttcatttctgttttatttgttaaatgtccaatatttaagttccagtccacagaacaacttgacaatatcacaatctgctgtactgaaaagtgtgattctaagcagtttgtggctttatcagggttgggaaggtagcaagaactaggttttcgtatgtcatcattgcataactctcctgcctgtagaatataccaaatgcccttgctgtgtacggtctatagggtcatctgcacaatgagtaatgctgtccttaccgcagggtcacacctaggtttcctgtccagtgttttccagatagcatcacacacattgatttactagtttccttcactttgtttttatctggttgggggtgattcattggttgctctctttggaaggagtcaggggtttgtttctgtggggttttgttgcagttgttaagggtttcggctctgtgagatagactccctatgttgcccaggttggcttaaaccttacagtgctccctcagtcttcccggtgctgggatttggtgctgtagtgtaccactacagctgttgtcttttgctaatctctagtcttctcagagcttctcccacactgcctgatttcccagcgctagctaatgtgaccggagagtcatgtccggcatctccgatgtaacacccaaacgtatcagcatcaatgtctgcgaaagccgaccgctcttaggaatgtttttgcacggcataaatcattattttaacgttgaaatggataaaaatggttaactaggttgacaggcttccctcctgccagctgatgtctgctgtgagcatttcagttcctggatgacagagcgagaacggatggctggctttcaatactatgcttgtgggggaattttcagtcaaaaatgtaaaactttgccaagctttgcatcgaattgctgtactcttcaagcacttgaaggccaatgattctgttgccctttgtgtttctccagcttcccatcgtggaaaagataagagtcattgcccagactgtctatggagccaaggacattgagctgtctcctgaggcgcagtccaaaatcgatcgctatacgcaacaggtaaacaagatccccccactattcttaggtagggtatctgccgttatctcaaaatacacaccttgattttaagttccgtctcctagtgaagctctactcaattgccagaggaccaacagagattaaaggtttggaagtgttggctaagtaaaccatcataataaagacacttactctctgactcaggtatccttgatctccgagatcatgaatgcggctctggtttgcagagctggggatggaacccagagccaggctcttgtactaggtcagcactttcccacggggctctatccgtatccaatgtatgcggtatggctgtcatcagagttcacatgcactcccaatccctcagtcagaagtgcagggaattgtccctttggtatgcagaggggagtcagcctttgattctttactgcccttttggctctactgtcttaaaaatccttgcatacgaccagtgaggtgaacgcaaagggagtgttcagtgttcagtgaggtctgtatgcaggtagttcattaccttgttctcaggagttgaaggctacaccatcttctacctctagacagggacaagggctggaggggctgtagcccaaaggtccctgagcctcaaatacttccacctgctttacccttgctacacagaagtcagcatctcagttcgatgtcaggatcactacattacaaataacattgtcgactttccccctccaacccctttgtcttatttagaatatgtgtgatattttgttaaatactatcctatcagtgccaagttgaatgctctctggggtctgataaaaatcgttttctcaactgggcagactggtatctcagacctttaatctcagggctcaggaggcagtggcaggcagatctctctgtgagttcgagcctggtctacagagctagttccaggacagccagggctacacaaagaaaccctgtcttaaaaaaaccaaatgtctactcacctggcatgggaggcaccacagtcatgaagtcagtttttgcaggcgaggcttacccattgcacccgggatttgctgaccctgcaatatccccaaatgtgggaaacctgactgcctagtttgtggtagtggaggatcccactcaccctctcccctggagaaaagaatttttttcttgaagtctgaacttgtattcttttggcatggctcgttcgtttctattttctgttgtactggccctggatctaaaagcctctctcacattctcagccagggctcaaccctagccccagcttctctgttttttttttggggggcgggggtggtttggttttttttttttttttttgagacagggtttctctgtatagccctggctgtcctggaattcactttgtatacaaggctggcctcgaactcagaaatctgcctgcctctgcctcccaaatgctgggactaaaggtgtgccaccaccacccggctctctctttcttctttgtgtgtatgagagagtgtgtgttttgcacacatgtgagcatacgggtgtgtgcatgtgtgcatagacatgcagaaagcatcatggtctacctgactgccttgaaatagggtctctcactgaactaaaagttaactgtcttggctgggttttttagtcagcatgctcttgggatcctcctgtctctactcatcccactcccatcatgctggagttacagacatgcacagccacatatatatataaaatatattcatatatagtatgtataataagtatttattttatattttatacattgtatattatataattatatatctatattatatatactatatgagatatagcatatatgattttatatactatatattatatataaattttacatgttatatatcttataacatatatttatattataacatatataaaatatgttctatattttaaattatatgtaataatttatattctttaatgttataatttattctaatagtcttttttcattttgaaatatgacttatggtagaatatgttaatgggatgatacattttttaatttatagtaaattttcaaaggccatgcatataattttataggaattatttcaatacttattcattttacaaaatcagaaattctaggtaccagttatgatattttttcctcgccaaaatcctcattaatatgtaaaagtagggatttcaagaatatagtacccactcccacccccgcccccacaactgatatggctctaaaatgttctaaatagttgtatgttgaatcataagcaattacattctgtcatctgtctgtctaccacgggaatattccttaagcattagtgtcaagtatgtggttgcaattaattagtaaggtctctgaaggaacactatgtgctgtgtaattacagcatccttcccagacactgttctttttgtaagttgctgcacgtgacttcctcccctttcacctttggaattctgggtcaggcacagactttggtccttaaaaataaaagaagctgaaaaagtgacctcatcttagttcctagaatgtaatcgcagatcaaatagccatgattcatgagccagcacaaagggccctttgcttcccagcagaccccaagaagggcagaacaatggccctaagagcctcatcaggagccttgttctggttacctttctccttcctggatatcaatagccttggaaagtgctttctacagcatgtccagtgctgtgtctaaaaatagccttgcttatacacacacacacacaatgcaagtgcctcctctctaggagaaccttcagagtaaacaaaaaaacctcacaaccgctaaataatggccttaagagcagaggtcttgtcctccctcagcttctagctgaacaaatagccacgcccactagcctcacctgctggagtctgtgcccagacacaattgctgcagagctgtaaacaaagatccagtgcacgaagccagcactcatggcaaagaaagtaattccttttcattcctgcagggttttggaaatttgcccatttgcatggcgaagacccacctctctctctctcatgaacctgacaaaaagggagtgccgagggatttcactctgcccatcagtgatgtccgggccagcatcggggctgggttcatttatcctttggtgggaacggtgagtaccagacctcaaagctattcctagtttgtgttgctgtcacgtcttaatcatgctctgccaactctacgaatcacacagcaggatggaattgacaatttttgctggttttctaagcactcttccaccaataacagggtgaaaatacacctctgccatctcgggccaggcccttctattttcagatcatgtgttcaggagccacagaggcataaagtgaatttccttctgggagagagaagagagtgagtggtctcaagatctgtctgctgactcagcagcagtgtggcccagtgaccgacttctgctgcaactcagagttacgatattgtatttctatgggcaagttggggctggctgctcacagtagccaggaccctaacagctaccccaggggtgagggggaatcagtggcccaccctctgtttccttcttcaacacatcttgtgtgtccctttgggatgacattacacatacatcttattcccaacatgttattgaaaagtatgaaataatataaaattgtcaagtggggacatttcacatttaaacataaaaggaaacattttagtgtagtggctttcaggagtcacactattattaagtaaagtattagaaaaagccagtggtgtatacctttaatcacagtattgaggagacagaggcagacagacccctgtgtgtccgagactagtcagtctaatctacatactgagtccgtgctctatatagtgagaccttgtcttatgtgtgtgtgtgtgtgtgtgtgtgtgtgtgtgtgtgtgtgtgtgtgtgtgtgagtgagagagagacagagagagacagagggggggtgagagagagagagagagagagagagagagagaccttgtgaccctgaacatagggaagaagctgattggtagacagaattgagtctagtgttagctcatttgaaaggttgtcgggacataggaaataagtctcttagaaacatagatgaagccaggaagatggtcctgtggtgaatnnnnnnnnnnnnnnnnnnnntggtgaatctcccaccccaccccacccccacctccatggccaggctaagaccaaagctgtcctgtaaaatcagcgtggactctttcccccagcctgttcctgggcctggctctctgacttatgacctgtaataaatgaatgcatggaacagtcctggagcagcagcagctactcacaggtttcctggagtgagccatcagtgacgttatctcaacgcagaagttcccctggtggctgctctcagggacagagggagtgtccctgcctgcccgaaatcaggcctgaggaatcaggaaggaagtgaggcctaagtaaagggggtccaggaaggcaggacactgtcacttggaggcactctgtgacagtacaggaagccatatgcaagctgggcaaattcccccaggaggccaggatctcctaataagggtggaatttactttctttgtccgcactctgggccctcccacagacttgctggaatgcatcaagcattcatcactcctctgagagacattgtggtaacttcctggtgggatgactaaggagaaggaatggggggtggggggcgggatgacactcagggaactgacccctgcaggtgggaaaattctagctggatgaagcaatgttatgcttagtcattccacattcaattgctatcaggcatcggagatactgagatacaaggctaacctccaatccccactccctgacgtccacaatcagaactgttctccattcttcaatagaattcattcattcattcattcattctcttattcagcaagtcattaatggtacctccagcatgcatggggaagaacgcggtcccttacctcccgtgtgggtttctggtacagagactctggtaaataaatgtccaacatggacagaacactgtgagctttagaacacaggggcaggtcccctcttggtgtgtcctgaaggcaggcagatagcccttctgtacctctgctgctgcttaagtcttgaaaacaaagaattccagcataagccagtccacccgcgagtggtaactggggtcagcttgactggtgttgggaaatcacatggggaatgctggaaaggcgtcacctctttgtccttctgggtattagcggctggacacctacctgaacttccttccttgcctagctgtcgcctgtatttttggggctgagctgtcacatcgcattctgtttggtaattgctttaattggtgctgattaacactttctaatggctagtgtggaggcttctctggcccatttcacctccccacgactttttatagaaacccctcggctcaccatcccgaagactttctggatgtgtgagggtagccaagtattttttctacagtcactttctttgtccctatgtaaaaatgcattcctgggctggcaagatggctcagtggatagagatgcttgctaccaagtctaacaacatcccaagtttaatcccaaggacccatatggtaggaagaaagaccctgctcctaaaaattgtccacagaatgccacacatgcatgcacacacccatacacaaaattaattattgtaaaagaatttaaggaacgtactcctgggtgcccctgcttctttaggatgacattacatatacatattctccccaacatattattgaaaattacgaaataataaaagattgtcaactggtatagtgcacacctcagtgcctcttttcctaagaaatcatttgccaaatgcatttttttttttttgagcaggggcagaaggagcaaatactttcttataattttcccaacctcaaattttataaactactctattccttggagctggtgatttataatagccaataaacccaagagcctgtgtaacttttcaaaaaataatctcatgatgaaagagattcgtgatatatatatcaggtgttctctgtcctatcacattggttcagcctttaattatttacaaagcctgtttaatcacttggcatgaaatattatttactctgtaagccatatatgtgaagtaatgttggaacataaattccttagagaaaggatcagaaagaccacaccaaacccttagtgtgaagtagtgtatatcacttttataacataaaaaatatgataaacggggaaatgataaaccataagcacttagaacaatatttaacttgggccaaacactttcaggagaatcagagttccccagcgtgtgggatctgaccccatgtctccgtcttgcctgtttgggctgctggtcatgttctgcaagcggcgcgctgcgttcaagcaaggggaaggagctgaagtggccctaagagacatgttctctgaaggtggtgtgtctgaatgtgttccgtgtttttgcaaaagggagaaaacccagagatttctccctgttaattagtcccgtgctcttcttacactcggtgttggggtggagacgggggcaaaggacttctttcttctcaaagagctttcctaagcagttacacatttccaaaacagcatggagaggtatccaaccaagcttgaattcttaacagatgtccatttgaagttggctttttctgtgactgtttttctttgatatcacatcgaggcttcgaacaaaggactctgaaggaatttacagtgggagttctttctaggtggctttcttggtggctggttggtgggtctccctatacatcccaggctagtcttgagctcacagctcctctgccttctaaatgctgccgttgtatgagttactatgcctagactgaatgcttttttttttttttttttttttgttaagtcccgtttatgacatacagggctgggtttttgtttttgagacagggtttgtctgtatagccttggctgtcctggaactcactttgtaggccaggctggccttgaacccagaaatctgcctgcctctacctcccgagtgctgggtttaaaggcgtgcaccaccacgtctggcagggctggaggattttatgataatcttgactggaatcttggactttaacaatcttacaattcatccagaacagattaagccatctagtggtatttatggggtagttagcaacatataggacatctctaagagctgctgggaatctgtctcaaagactcatgaggaaggcatacaatgaggcagggacatccgtgacacccagtggctgtccatctggttccttctgtcttctagtccattccctcagcgacctgcctaaggagaatccttaaaagatcctaaaagatgattctgtatgcatgtgcacactccttttttattctctccttgtggggaggagccaaagtggacctaccccaaagtagaagtccccgggacaaagattagaagatcagcttcgtgctgggcggnnnnnnnnnnnnnnnnnnnnttccaggacagccaaggctatacagagaaaccctgtctcaaaagaaaaaaaaaaaaaatcagcttcaacttgctatggcttttgtctctcctatgggtgacctgatctggccacaccgtaccactaccaggtgcacccctgacatcattgccctagctggcccccagaaagcaggaagctgccagagccaatgggggaatcagtgacgtcatacccagatgacgctgggtggagatttactggacccggtacaggggttgcggggtaaacacagcaagccccggcctcaccctccagaggcattgccggtttgttctttctcacgttccgttgaactccttctgttttccctccttgctctctaagtatgtactgaatgtagagctgcctgctgcgctgattcaggtcagcttgctgggatgcatccccacccgccaccccctccacttcaggatgcatggttagccaagcgctttctaaattccactgcccaccggcgaaggtgaagtcattcagaccttgtagatttcaatcggagggacagtttgtgccattttccagagatagacttttatttacacagtgagaaaagcaaacactccccaagccgtgctctaagtgagacgtacaaaccatagtaaagcggtgaactccaccagcccaggttgtccatcgggggagctcacacacaatgtacttcctgcaaaatcacctacacccctctcccttgctctcctgccccatagttcagtggagaaactcccagcctgcttcacaaaagtttcaacaaaacacgttcccctctgtggtgcccctagctcctggcatctgtaacaccctgagttgggaatgatgcagctccgtgtggcctgtggcccctggctgagcccttggcagttccctcctcttccctaccttgtgacgttttgcttccctatctaacatcagagtttcctgctttccctcagacatggcccttacatcagcagcttcctcttgacgtggtgtactgacagggggtcctctgcctgcatggcagtgtgcctccgttcagggaaatcccacgttctgcccagaaacagaggagaccttcctgtccattcagcatgctatgtccaagggagaggacggtgactggtgtcctcagtttccaaaaactattgaccaacaagaggagaaagctctgtgtgactcaccgggccagtgcctttctgctacaaaaggtcatctgggtcccatccccttgtttcaatcttttcctccctagatgaaagccaaattcttctctgcataaacccagagttaacttaaatgaaagcagtccccatgttacctgtgtgtggtggcacattccaccacttaaggagcaagagtgggagagaatgggagttcaaggccaacctggaatgtgggggaaatggaaagagcgagaggggagagatgatgcctcctgagtggcaggcttctctttctgtgatgggtggaatgcagccttacacttgctcgcccagccttctcccattgagctacaatcccagactagagttgaaccttgttcttttactttctgcatatttagccgctctctgcccagcctgcaatcagctttatcaacttattgttttctctagcgattgatacgatctgattccattctctcccacctccacgtttggcctccttgttttcattcccgggggttttggtttggatttcaggcataggaatgttagcaaaaatacacccttgttcactcgagcgcctgagagacacccgtcaagtcatcttgtgcttccggcatttgtcatagtctgtccctctttatcacacttccttacccacgggctttgccaagaatcctataatcagaagcaggggacatttatgcaaatgaaataaaattaaagccaaaatgctaatgttgcaaaaaaaaaaaaaaaaagtaataggccaccctcagagtctgtcggagggctcagtgggaagaataaatgagaaagaaaagataaacttgtaagaaaatacccttttgtaaaactcagacggcagtgtgcagagaaatttaactgatagaatctggacttcataaccgtttacaagataaactgagtatgtgtctgctaaattagccagccacgaatactgggttgaatgggaatgggaaatgcgctagactgctcttgagagaattggtagcgctgccttctctgagaatcgctgagcatttaatttgatgtaggctgggagtttaaggtgctgagcccattgtgacgtcagcctccagtggagactgggcactccctccccaagaatcaattgtgggcagtagtgtagtacccatgtctgtctgtacctcccaacattcacctttcattttccaaacatatctgtttctccactgaacacaaagcaactgcagctcccaagcttgcccaggatgagatagagagtgggcaggcttgggcgagtgccatgagaatatacatgttctctgaatgctccatttctctggcaagcacacatcattcctgcctctcgctgcacccaggtgaagcacattgcctgtgcttcccttgggtagcctcttagtcgaccaggtcatcgatgcaatgtctcttgttaatccaagccccgctccccctgtacatctcttggtttcagctctgtgtgccttgctgcagtgagacactccacgtagaacagcaacttgactgctagctactgagaataagctcacagcagatgagggagcctttaggagtcttctgccattatgaattcaccagcactacagttctcaaaaccgtctataatagtcttctaaagagttaggagtacagcctcagaggctcacaaatcctgtctgacctggtagtcctcatccagctaagtgttgccataaaaccaggtcctgacacatcaaccttactgatgtgttcagacagggagttacatatcgaatatcccactatagaggaagaaacagaatgaagtatgttgtcatcctgtttccaaaataaactctatgaccagctataagaacgttcatgacgagttcaaaaccagggaacaccaagtacaactccatcccgtaactccgttttgatactctctacctatagatcttgttagatgctataggctaaggctcagccacttgtgactgggctacccatccttctgaatgactggctcactgaaaaccatggttcttactatcctcttcccggcttcacttaatctgcctggatgacttagaactaggggtcatggctgactgctttgttctggttgctgtgaatgagacgggtgaagaagagataagtcaggtgctgtctggagcgtcctggctgctagatcttctgcccccgtggtattcaccacactcaaagccatcagagtttcttccagagggtttgtaatcaatcccaccctgcctttcctggagataagtgggtggatgggctggaggttccagtcttgctcccctcctttccagtgatggggaccaactcatgcaaatattctacaaactagctccaccccagccttccagtcctctcagaagtatttcctgagcaggcccatgtcagcccatgttccagaaagtctctccctactagagcgattgtaaataaagagaagggtggaagagatgggagccctttgactcaaatctgtctcctctgagatgttgtttagagacatttatggcagaagaatcagagtgtgtggcctggagagatagctcagtggttaagagcactggctgttcttcctgaggacccgggtttgattcccagcaaccacatggcagctcacaactgcctgtaagtccaagaactgacattatcatatagacatgtatgcaagcaaaacacataacataaagataaattaatttaaaaatagaaataaaaaagaatcctagtgtgctgagacatggagaatggtggtcagagggaggaagaggtgaggaacccaactctaaatggtgcattagcatctctgctgaagaagtttgccctctggtatcaataagttagccatggagcacttttacaggaccagtaagggtgtgggggacagtgtttcagccagtaatgagcttgacaaggcttgctgaagatcagtgttaccaagataagtgtgcatgaagactgtcgttacctatggcatcgttacctgggcccactacgattgtcctggcattttaaatgtagagaagtgattttcatttcctgagttttaactagaaagagaggatgtctcaggcttcttacaagagaaaaaaaaatgtcaattttcttggagagttggatccatagcatttgattttccttatgaccagatccttcctatacctatgaccccaatatagttgctttgttaacgtgaaagcaggcattaatggaaggaccttataggaatattttaactaaaaaaaaaaaaaaatgttcctgtcaccctggaaattccacgggttttaggaaccctcaggactacaactgaggatagccaccaaatatgtgtaaactttcacatttccatgggtggaagatacgggttgggggtggaggtaggtgtgggggaggatccaacaccatttcatagacaacttaagcatctatggattttggtatccacaagtagggatccagtaatgttagatgatgtgtttataaaaagataaagagaggggggatagttctgtgatggtgtgtagtgaggtatgggggaagaggagttccttggtgggcccatgctgaagtatcctttccccctgagggaccagccacaggacagcatagtatagaatagagtttattcagggcatggggaagggagtcaagagggtagtagaggcagagacaggtagagtgagagaatagagaagtagaggccagccatgagcacgtgggggggggggggggaagagagttggagcaagaacaagagaggaacaagtcagagaggagggggcaagcagccccgtttatagtgagtcaggcacacctggctgttgccatgtaactgtggggcagagcttagacagaatgctaacactagagacagcagctctgtctggccttcacagatgtgcctgggatttctaactcagaaccactgatccatcatagatcagaagcctctaaagttgtctcagactgtattaacattaataagtagagctgtcaatgaagaagaaattgcatctggttgaggcccttctagtttgtctgctctatacagatattgtgatacattgtagctccccattctcaactctggctgtgatggaggctagcccaagacactggagcccttaacctgtttttctgtcaactctaccttctctctcttatatggttagagagacgccaaaggctgagagcgacatccaagctgtaatatcacagtgggaggtgacaacttttcttctctgcctatatttacaaaagcagtgcacatttcttccatgctgctcaacttaaacgcaagttttacatgtcatcccaggcagggcaagtttcacggccaacatgagctaccttgtgacgccccatctccaaaaaacaaggggcaagttctagttgtgacctgatttttagtgtgtcccctcagtcctctccattgaggttggtcagcatagctcccaagtccatgaggtcattggtattccttcccaagttactaagtgtctttcacacaaataaaagtcactatactggtagctataagttcttcacttctcagtgtcattataactgactttccccccaaaacaaagctgtttgacagctggagtctgttttcattttgaggtttgtcataaggagtggaatgtgcttctgtttaagagttgggaacattttggcagggagagagaagagaaactacaccccacataaggaagggagtccctttcagcttttataaaaaaaaaaaaattcctggttttctcttgaggcataagctagaagcttgtgtctttggggtagaaaagatttcaggagaaaaatccattactggaactatgtagctagaaaaagagatggttttgtgcaggaaaatagaggtaacttttccagccagaacttcagagttcttcctctccttgggcagtaagtagttaagggcacatctcaaccacggtagggaatgtctgcagagctttctgtaaaatatgcccataaatcctcccccagagcttctgagatcacagatccgagctgaagacagtgatggagtagtagcgcagttcatgtgaagtgcactggtccacttcagcgagctgggacagccagctccccgtccacccttccccccaccatcgctatacagcctcagctccccatacagttcctctcagcagagactctgccttctacagctccgtgattcctaaggtctcccatggaagtgagctagctagctagcttgcttgcttgcttgcttgcttgcttgcttgcttgcttgcttgcttgcttgcttgctttgtatccttttttatttatttttagtgtgtgttgatggggtactatagcaccaagtagaagccaaagacaactttagagagccagttctctccttccacctttggttctgggggttaaattcaggtcatcaagcttgtgagcaaacactgaactactgctagctctttactgagcccgtgcatgatctctttctggctccaaaagaatctttttttttttttacaaatataatatataactttttttagatagcttccagccagaaattattgtaagtacatcttatgattccatgtctaaaatgtgttatgacttagaaacctaatttgtgcgtagggataaggtttcatggtataaactgtctacaatataagaatgcatacaagtggccaggtgcggtggtgcacgcctttaatctcagcactcagaagtagacgcaggcctgatctatataccacattatgggctagccagagctacacagtgaggctctgtcttattaattaattaattaagtaattaagtgggctggaaaggtggctcaatagttgagagcacttgctgatcttccagaggtcctgagttcaattcccagcaacctcatggtggctcatgaccatctataatgggatctgatgtctgtttctggcacgtaggtgtacatgcaggtagagtatgtatgcatataaaataaataaaattaacctttataattaaataaaatgcaatgagtgtatagacccacaggtcagtagcagagcatttgcctcacactgaagagatccatctcttcaacacatccaggaaaaagggcatagaaaaggcagggaaaataaggagtcgcttataccaatcatgataaaaataaaaactgtcctcagaactaatgtttatggagcacttgaagtgtcgggcagtgttcagagccatttgtgtatagctgactcttttgctgttcccagtgtcctttcgggagaatcgcatctctgttcttgttctgaaagcccaggggacttaagtctcttacccagccatagatggcaagtggcaggtcaggattcatcattgactttccttcttagaaaatattcccatttttctgctggggatgtggtcctcttttctgtgaattagtcaaattaaactttgcttctgccaaccaattagaaagggcaacttcaaactacttgcccattttgtgggcagatgatgtccaaacctttgtgcctgggcgtttgatatttccatactaattagtgaaatggaccagcaaattggctcagcaggtaaaagagcttgccacaccagcctgaaaatttgagttcaactcccaggctccttagtaggagagagctgactcctgaaagttgtcctttgacttctacagagtcaaatgccttcagaggtctggggagatggttcagtcatccaactacttaccaggcaagcgtgaggacctgagttcaaacctcaggagcttacataataaagtgagcatggcagtagtcacctctaaccccagcactgagagagcagagtcctagaggtcaacagatagtcagccttaccaaaccagtgggttccagattcagtgatagacattatctcaaaataagggcaactgaggaggacactctagccctctagctccacacgtgtaccacagatagtcacacaaataaatttcattactagcgaagctttctcaagctctttgttgaaaccccacccccttctgggactgacatctgaaaacaaaacaaaacaaaggggcaacgtgcaaatggtagtggcacttttacactaaagagacagattctcctcaccaagaaaaacacccatccatacacagcgaggtggcgctctgtcctgctttcactctccacagtaaattaaaacatgccagggaaccttcacacctatgaggacagctggacagagaatgttaatttcactgcgtgtcagacacagcctgtggcatatttataatgggctgaggtgaaacctcttgtctcacttcatttccatatgtaataagagaggcctagccaatctcccacattgattgaataaaataaatagctttttgctaccaaagaataagactggggaaggagggctcgagagatagctcagtggttaagagcactgactgctcttccagaggtcctaagttcaattccttgcaaccacatggtggctcacaaccatctgtaatgaattctgatgccctcttcttgtgtgtctgaagacagctactcatacacatataaataaataattctttgggggagaagaaaaaagtagggaaggtccatggcaggaaccagcatgggtggcaccaaaaattcgaacagagcagcccatggggacaccaatggcttgtattttgcatggcctgcactcttggtcttccaaaagttttgggtatgtatcatagaaacatgattcattttgctttagaaatgccctgacagtgacagccaaccaaagtcattctttccattacaaatttacacagttttctgcaggctggatgatattgtgcctacagagtttgtctcatggatctcacaggatatcgtaaaaataattatttatgggcgtacatataattttaatttgcccttgtgagaaaggagagacatgattcaggtgtgcccttaaccccactcccttaattccctaaacccttgccacacctgtagtgaggccatggattccagtgttgaaggacacatgtccccacctggctatcttaacctgcaacagttcagtaaatccctacaggtctcctaagatgtgtgtgagtgtgtgtgttcctgtatatttttcctaagccaccatttcctggacccccaaattattattttctctagtgataagcacattgtgagactcgagacaaataggatacctaggcttagcatccacccttatatagctggtaccttcatccctgggtacactgatgcccttccattccacttctgtcttaggcttctgtaattctgaactggatataattggtattattataaaatcaaactaggaacattggtgagtgctggagttttgttgtggctggtggttttcgtgacagttgacaacctcttgaggcagaaaatgctccccacttcccattttgttgagtacacctcatactaaatattctcagtagtgggatgctgttgctacccgggccacctggtgattggcatgtcccagagcactttctggagcatgtgcactgctgcacactgtaccgttcactggaggcagctgtgtgcagcacttgtgagcacgcccagctgtcttttggcacagtgaggacggacgcttcctcgggatattgcataatacgcaggggaatcgttgctttcagtggatgtttggctttactgcgttccagactgaagcctttcctgtgttgcaaaggaaggttctctagtcactcaaggaaagacataggagttcagcacagggcaaagcaggccacagttcgcagggagacaccacctccaaggtaaggcagcacagcattcatggaaaacgtgctgaaacaactcaagcaatgtatttaaatagtagagccttccgagtgtctccttggcatggagtatgcaccccagagggaacaatggagattttggttattgccaaaagctcaggtgctagagttctccccaaaggaaacgactagccctcttctattaggtatcctgtcctaaggcatgtgggaccattcattaagccagtatagcctactgaaggcaccctgttgcacacaaaatgccagaggtctgattcacctgttcagcatatatagaggaatgttgggtacaaagccaagagaaaaccacaaaggcccttgcccttgaggaatgaacaagctagtgagagacacaagcctgcagagtggatggccctgaaagccatagagaacttaaccaggtaatacaagacatagaggcagaagatacagaccttcaaggcctgaaacaatattgctgatgtcctttaatatggcaagcctgtataagtggtacaagagttacaatgtgttatgacactgggcaggaaggcatgacccaggtcacatgaaattgagtgccaagcttgggaattagagtttatcttgcagagcctgagaatcttaagtggagcaatataattaattatgttcacatttttagaaagatcactcaggtggcaagatggatggaacagagggaggaggacttaatcttgttaagatggtaactgttatggcgggagggagtgccacacacccttaatcccagcactggggaggcagagacaagcggagctctgtgtgttagttagaaaccagcctcatctacaaagcaagttaccagacagtcaggaatgttacaaagaaactctgtctcaaaaaaacaacaaacaaacaaaaagatggtaacagttacaaagacaaagaactacataaggttgagtgagctagagacaggaaatcaggtaggaagatacaacagtacctaaagtgcgacatcaaggaagctcattagacactctggggtctttactcttacctggtccttgagcacaaatagttgagggcaaagactttgcgacatttctcttttcttcctagtggctaacagtacctggaaacatttaaaaagtgttggccaggcaacaggagagaaaaagagtgatcttagttatcttaaaaaaaaaaacaaaaaacaaaaaaacagtttggacagagtgagcttgtatgcctacttagggactcatgggagccccgccctcacccacacccccagcatcctctctgcaggcggggtttcatgaggaccctgctctcccacctgttacattatcccagtcctgcacagtgatgaatttgtttttttgttttgttttttggttttggtttttttaatcatgttaaggaaagcagttttacaagttcaagtgcagacaccaggacactttgtatcgggtttaaggttcagtggtgagatccgttatcaacataggattctggagacaggagcgtctccaggcattgacgattactgccgcagaccctcttggttccttgtctgcgtggaacgagtctctggtgcaggtgggcaaggagttggtgggaattgacaggactggacacaagggagtgtggatctgaatgtaatttgtcaaatcgagcatcaaactttttacacagaagaaaatagggaagttgggtgacacactggcaaggtacaaagaggttactggattcttacacaaaacaaaggaatacaaacatggaaggactggcaggaaccaattggggtaaaactcaatgttaacaactgggatcaaaaacagctccacctaaggtccacttaatcttagaagccaggggcaagggcacgaagcccttgccatagttcctgctctagtctatttattgtatagtccatcttccccttaggccattataaatacttgtgtatgggtataactcagctatctatagttctaagtatctactccggttcctctttaggtcacaaacttccttcttcctagataacggtaaatttctgtgtagggcagtgacttagctatacatgcccaaggtcagatcaaagactacctagaatctaacttagctatatgtcaaaatatcaatacttaggaacacttgtaataaaacaatattgtcgcgtcccactcgaccagcaagaaagacgcaaccaccaaccaccggttcttctttaagcagtttactcaagcagctactttcttcaaatcccccagcctctcttgttacaagtgtttttctccactccagccacaaccacacccccaccaatcaccacaggtcacatcacctcaccaggcaggcttgctcagccaatcagggattaagggcgggccatccaccaaacatgggcttgtttactacctggagcagatctccatcctgctgaccagggagccccaatggcttcctacacaatattaagggaaagcacacagatccctttaccaactaaagcaaggacattggagcattctttatacaggatgccacggttccaggagactaagtttccgtgaacttttcaccttgggacagtgcccaggttttcagggcctgttgcgcttgtcactactggagtgggtgtagcagattacactgggcattgtggtacactatgattctagcactcaggagcctctggcaggaggagtctagcaacagtctctcccaaaccagtcccacagaaagtctaactccatacctacctcctcttcaggctggtttgttagagatggtgtaagaggaagaagcttaatctctgccacctggcttacactgttccacccatttcttcaaagagcctgctcctcagacttttcccaggagagctggtcacatcaaggctcccacctggaaggattttctacacagcctttgaagtcaaccattcatgttcaatcaacctgattgtcaaaggacagtagataactaagatccctcttctttagtcttgttgcctggccaacacttttttaatgtttccaggtactgttagccactaggaagaaaagacagatatctcaaagtctttgccctcaactatttgtattcaaggaccaaaaaaggagatgcaacatgcatctcagtagtatgttgagaacagaaacagggtgagtggccctttgatgcaaagaggagaaagatcaaataaaagcacgtgaatttttgcataaaactctgtaaaggatacagttgaacttgaaaactgaaacctctcagtgggtaaggggcttgccctgtgcaagcttgaatccaagtgaaaagccaggtgtgatggcacacccttgtaatcctagcatcaaggaggcacagacagatccctgggacttgccagcttatttgatgacttgcaggctaataagagaccctgtgcccctctccccagaaaaggttggtggcatgctgagaaaatacacccaagtttaacttgtgacctccacacatgcacacacacactcacacatacatacacacactcacacatacatacatacacacacacacacacagagtctgaaaagggaaatcactatttgtttatttagttttgaatttcattctgggtggctttaactgggatggaaggcttagaaagccccatgacagttgttctttaaaatgtccatctcagctaacacgtggaatatagctctgtctttggtctcaggagttaatgttaggacctaaagtgaccttgtaagctggatgcagtggtgctcacctatctgtctcagccactccagacacagaaggagttctaggacaagcccgggcaatattgtgaaactggcctatgtgggcccctacttgcacttaattacatgtgtgtgtgtgtgtgtgtgtgtgtgtgagcacttccatatcctacccttagtgatggtgggtaacaccttgctttattttaagtgtctcaggggatagcgtgaaaactgtgccaagtcaactgtaatagtagaaaagttttcaaacaaattgcaggtcttctgtatcgtctcaacgtctatgttttaaaaactaagaattctccctttgggtctttttactcctctctcgcttcctttaccgtcacccgtcacccacagcctttgttctcgtagccttcaaacaggattaattgatgccatgcagcatcaggaaaagcctgaatattttgtaagaggattcatctcgctaaatgcccatctttcttttcaacttcgctgacaaacatggtttatgcagatgtagcgcaatttgtttatttccctgtttaaatttgaggctctttagcatagcatgtttcctttgcgagaggctagccaaaaataatattgacaaacctgtgaaggcttccatctgatactattgcaatcttatgcaaatgtatttagacagttaagtgaatagaataattaaacatccaaatgtcaagaaaggagtggaggtgggggggatgggcggcaatgaagcatttgaaaaatacacctttaaaactaaaaggtctggcttgcatctggtttgtttattattgttgttttgtttatcttgatttcattgctgttttcagacttaaacagagcacactgtagcaatagaaaatgattggcattttagaggaccatactttccccgcacatgccatcagaagcttgaaagacccctgtcctaatgcttccactgggaccaggccactcctggatgaattcattcaagagggagaggctctcaaagcacaacactgaattgtttgtctttagaaatatgctcctttaaagtctccagaaaaatccaagaatgagaagagcctaatacttggcagaaaaagtccaactgcagagtcgtgtcctgaaactctgtcttctctaacaaagctggcttccaaagaaagtcacatcgtatgtgataaatttgaaatgttccctctatgacatcttttaaattcctgagaaatatccaactttgagatggaaacctttctttttccaatttagcaaagattggtttaagattcactattatcccgcgcgccccctcccccggtgccccccctcccccgtcccggggagaaaaaaaaacttttaatattaatataagtgattgcctattccttaccaaggcagcaaatgtctgctcactttctggctttgtgctatcattttcaggggagcaggtagtgttgtttcctgggctgtcttttctgaaggaaaggtcttgtagaacccaggcccagccctgccctccagccccaggctgccccaccttactcctgactccttgctggcctgctccaataccgcctcttctccaagctgcaaggccgggtgagagcttaaactagacctgtttgtcagaactctcctgtggtttcaaataacagaaactcggctcagacttggacaaagaggaagaacaaattggcccacataaaggagaagttctgcagttgatcgggtctcagccactgctgtaggcagactgatggcttctgtcctcctttccttgaggtggctctgcccactccgccccctgtgcctgtcacagaggcccacctcagataagactctgggagaaggacctctcctctaccattgcaaacagaccagtactcagcggccctgtttgtcaggccagcctagcatcattgctgtgacccagcagcagggatccacctgtgccagagagaatggcctccaaactcaggacatcaggaagcacagcagtgactgtcactcatcagagacttcccactggcaaaggctactgtgtgctctgttgtgggcagggcggttgggatgcaggagataaaaagtcattcaatgcataacttagtatatagctgcagctccttctcatggtgtgttttgtgttgcatggagtcttctctgtgagacttcattttcttcttcaaacacaagttgcagacatcaatagaaagcctccctaagacagggagctctctcagacttgagctgattcttgtacatacacaaacttcctactgttgcccatattgtttcttgctcagcacatacaaacagtgtgggtagatcagtgcactccattttagtgttaaaactaggaaagcaaattctactagtttggccagttaaaaagaccatatgccattccgccatgtttaagtctgtgtagctgacaactttatacatgtatgcaatgtcctttgttcacgctcactccccagcactgtctctcatccatcggccatctccaccaagccccttattgccttcagatcccctcagatccccctgctgtcttcctgcctgctttctgtttgttttagtgtgtgggtgtgcgtgcatgcacgtgtaggaagggtgtgccggagcgtgcgctggtacacgagttttactcagcttaattcgggttgcttgtgtgaacgttattagggagttatttattggaacatggacaacttaacagtggtggcatcactagaaccaaccacatttaaacatttatactttccactcccccttttccctcctctccctccctccccccttgtttttgtttgtttgctttgttttgttttagctttgactattttttaactttctatgtagactatactggcttcaaactcaacagagagatctgcctgcctctctctctaccgagaggtgagactaaaggcatgcaccaccacactcagcaactttttatcatttttataggtagtagatgccacattttaagtctgaaaacatcagaaagaaataatgaggtgtggtgtcaagcggtgtgatccgggtgcccaggaggcaggggctggaggatcaggtattccaggtcacccccacgtacaagaatcagctgtggtacccagaaatgtgctggcaaaggaaaggccttaaatttgtaattttacatgtatttatttattgagtgtgtgtgtgcatggtatgggagtggaggggcacctggttgctgaggcatatagtgagattgaggctggcttgggatacctgagatttcatctcaaaggaaaaaaaaacaataaaaaaaaatgagtggtacaatgcctgctgggtaattcaaggccctgaattcaatctttagcactgtaggggatggatggatggatggatggacggacggacagaggacagacagatgggtgggtgggtggatggatagatagactagtagatggatagatggcatagaagcttgcattgcagatagtgacatataaatgtgtattttcatttatttattgattcatggtctgcaagccatccagtggcagggcattgctgtgtggttaattctttaccccacactggaaccggatggcaacctgccatctaggattcaccattcactccttcctgcttgccagagctgtggagataccagccaatgtactccgtcgtaccccatgttttgctgtctttttgtgtgcctgaggactgcgggggcattataaacgtgggaagacttgagagtcacatgtgcctagtaagcttgttctagagcatgacaccatgaaagggacgtgcaacattaaccagacaactcagccctgactggggccgttggccacaggagacttctgcataaccctaaatgacagctacagtacagatccgatggcagcccccgtgtttggttaagaaaagcttattgtggtccttctatgcacagtaacgggcacgcttgcaggaccacactggagtagaaagctccattgtggtttgaggaggaggatgccttttgtctggtgacccagctaagggaacctgagccaagatcatatcggtgatggaggtagaaacacctcaggatcttccagtgttgtttttcacttttttttttgttcttggaactggttcctaatgctagcagatctttggaatcctgaggcatttcctcagggctctgagttgcagctttgggtcagcgccctcttgaactgccggtttcattacaacaaccatatgcttccctactcactccctgacctcccccccttcctcctctctcccacaccctaacccttcccctctctttttctggactcttttggcttttttgtgtctccacccactaatcccagaagagtctcttaagtgttcagagcagatcgcccaatcatttctcaaaagctaacttagtagaaattgcttaagctttttgatattaagtggagtaaacattttaatttgaccccatatcccacgacagcttaacatgacggtatagaaaaggtaggaaatttaaactctcacaagttggcaagaatattaccattttgcccgcacttggcattgtcaacaagggtccattcactggaggggtcatcggtctccataaagacaggaccaatacttgtctgcagctgcgtttcctttgaactcatctacgtgtctttgaagcaatgatcacggtctccagctttgattctgactctgtggacctgcgccagttttcctgatttcattaaatttttggaaagaactgaaactatggtatcattttattgcagctttgacatcaatcataatttggggcggtcttggtgaaagacaaggaattcagactgggaggctggggaaagcgggtcccggggcaaagggatagaatgcactgtttacttcatacaagttcagccacctcgaccttgtggatttttagctggctttattctaaagcagctacagtcatatggcccaaatctagttatatttaaaaacaaaaacaaaaaaaaaaaaaaaaaaaaacccgcataattttagagaggcctctctctccttccttcccgcctcatctcttcttctctctcctctctttctccttccatcttttctttccttctctgtcttctcccactagctttctctccccagccccttccctctttccctctctgctggctcaataggctggaggacctgtgtgtgctggtggttcatggcaaatctgaacccagaatctattcaatagattctccctcgctccactttctcctcccccaccctccttcaaccaagtctgccacgatggtgttttcctctgctctgcctttgccgctttatctttggaagcgccttcctgtgagatgcccaaccccattgccccaagtactcctcccctcagcgggcccagcgttgccttcttcagcatcctctatccttcgtcctacgcaccaacttgtccaaaatcattttcctgtccaagtgtcttctccagggaccccctcaccctgcagttcgtgaaggcatttgcttatgtgccattcaaaggggcaggtattagggacagtggtaaggacagggccaccccaggcaggtcctgcggatgtcctgagcatggcatggacttgctttccctcttccagccaattgtccaaacagcaattcccaagacagccaacagaagccaccacgtggatgtcacaagagagcccagctctggactgatgctttgcaacaggacaccattcttcccatgctcagatgactgagatatcaccagacttactgtgtctggacaaagtgacatgaaaatcgcacagtgacacagagaaaccctgtaaaaaaaaaaaaactttttaaaattcatatatatacacacacacacacacacacacatatatatatacacacatacacacatacatacataaaaatgtttatgtcttaaaccctgcaaatatattataatggaaaatacctcggaggactctcacatgtcccaagatacccctctgctctaccaagctaacacctctgacagttgccttgctaggatgtgtgctgtgttgaagcagtgttggtggacatctgcacttcgattggccatggcatcttttacccatattcttcccaagttcttccacctcttggcttctgtctgtaacactgtctcttgacacagaggctgagaaacatttcctctaaagggaccaaagcagcttcatggatcaggcttagacccacccatacggtctcatcaatgttatcccctttcctagtgtcccctctgaaaaccccttatcccctccctccttctcctgctcactcccacttcctggccctggcattcccctaaaccagggcatagagccttcacaggaccaagggcctctcctcccattgatgaccgactaggccatcctcagttacatatgcagctggagccatgagtcccaccatatgtattcgttggttgatggtttagtcccagggagctctggagacactgggaagttcatattgttgttcctcctatggggctgcaaaccctttcagttccttgggtcctttctcacgctccttcattgggggccctgtgctccatccagtggatgactgagcatccacttctggattaactggcagagctcacaggagacagcctcaccaggctcctgtcagcaagcacttcccagcatccacactaagtgtctgggtttggtgattgtctatgtgatggatctccaggaggggcactacgatctccatcttacctgctcagctccactgtgaactcgtaaaacagccacatggccatatccagtgtgtgtgcgcacacacacacacacacacacacacacacacacaccactgtctatattctaataaagctttatttgtaaaaaacagacagctagccagatttagttgtgcaagccttaccttatgttattgtcttaagagttttcattgctgtgaacagacaccatgaccagggcaactcttgtaaggacaacttttttttttttttttttttttcggattttcaagacagggttttggctgtcctggaactcactctgtacaccagggctggcctcgaactcagaaatctgactgcctctacctcccaagtgctgggattaaaggcgcgtaaggacaacttttaatccgtgctggtttataggttcagaggttcagtccattatcctcaagacaggagaatggcagcatccaggcaggcatggtgtaggagttgctgagagtgctacatcttcagctgaaggctgctagcagaatactggctaccaagcagctaggatgaaggtcttaaagcctacacccacagtgacacacctacttcaacaaggccacccaattctaatagtgccactccctgggttgagcatatacaaaccattacaataactgactcaaaaggagattcctgtgatgttgtgtttcagtagcaactatgtaaaactgctccagaaaggcccagcatacccaggtacaagatgaaaggggctaagaaagctttcttaaagcagagagccggccatgttcctttgctggtgggctttcctagctcccagaaaaggaggtaaagcattggcagagaattgttaagagaattccaaaaacttttgtgtcactttccctaagttccaaaatgggacaggggatggaagagatgcctgccacatctagaaggcacacgtggaagtgacatgtttctgtgcgcaccagatttgctgtaggcatgtgtaataatacgtcacaatgactgaagtggctggtggtggactggaggaggcaaaggaagtaaagtggcgtgttagttgaagttgaataccatttaaccaccatcccaagttatggcaggaggcgtactgagggaacccctacacccacacccaaaagagcgctgacgttggtagtctgggccttatgtataaggaaaactctagctttatcagcctgatttctgtgggaaaatacctaatagactgatggcatccgtctgcgtcagcatgctagagagttaatcagatatgtgtcagatgcctgagctatgttagagaatgcgccctggtaggaagctgtcaatcatcagggtcaccgagagggcagcagaaggaggcacagtttatagctcaaatagaacatgagtgcacccttgtctgcctgctcattcctacaaatgttcttaggggctttttagtattttgagacaggctctcactctgtagtcctggccagcctggacctcactatatatatataaagaaaccaaactggccttgaactcacagagatccacttgcctctgcctctcacgtgctgggattgaaggtatgcactatcacacctggccctaaatattattttttcttttttagggatacatattattttaaactacattttaagtaaagactctcttgtgcctgtcttaagtattataaacattttatctgagaagattgctttcttgtgtttatgtgttagttgggtgttacatagtggagcttattaatgtaattttgttcttgggatccttatcttaacatctaatttcccagtgtatcatgtttctgataacattgctctctaattggtgggtggaattatagttaacttgaaaagttctgcaagcctataaagtttgcacgcacatttgtaaggcaatattatctcccttgatgagaaataacactcttcagggtacactgcatgctgtgaaacgtggagtcacaggaataaactgaacctcttcttgaaataattaaaagcttgaaagaagttatgaaaaaataataccgaagccaccgagtgtgtgctggaatagaaccctaatcttcaagagagtaggaagtcggcgaggggatccccagaacgagtggtcctagtgttatctggaaaagagctccaggctagtgtacaaggagaagaatcccagaggacagaagaagctcagcttgttaccttgctgaagacacagagagggtgtgcgtccgggaaatcaaggcagctagcgtttgcatggagggtatttatccgagaacagccttccttgggcactcaggatagtctgatccacacactacctggtaaagccaggggagggctcacctagaaggattaagggaatcgtgtgtggctgccgtgaaggcaggaagaggcagaaaatattcaaaagtcttgccttggcgggaaggataaaattaatcccagagtaaacacgactctagctctccctcacaaagattaaaagcaaagcccaagagagtcagcctgggctagagggactaaaagtgacttaactgtcccagaacaggatataagaatccgtatccgggccagtgaggtggctcctcaggtaaagtcgcctgcaggcgagcctcacaacccaaatattagcctcaggacacacttggtagatggagagggccaactctcacagtttgtcttattgtttctatatacatacatacatacatacatacatacatacatacatacatacatacattcatggaacaagttttcaataaacagatataaaagcaatgtatacataataaaacgtccagctttcattccaacaaaagcctaagaagaagtaagagtatgtcttatgatgaagaatcaaaattaacccatttgttttacatatgttagaaccagtagacactgaccctaaaaacagcagttaagagcactggctgctcttgtaggggacccaggttcaattcttagcaccctcatggtggatcacaactttggggagctctagctccaaggaatccgatgccatcttctggccatccacaggcaccaggcatgcatgtggcacgtaaacttacattgaagcaaaccacccacatgtataaaacttttttcttaagttacatgaacatggactcactcaaaggatgtactgtgtaagagaagggcggtgggcaatcactaatactaatccaaaggcgactggggttatagaactccagtggagaacagcatgggaggctgcgtgagatggctcagtgggtaaggtgttgcccacacaagtgtgggagtccgagttcaaaccccaaagctcatttaaacctggacacagtatgtgtctgtaatctgagtgttctcacactgagacggagagtggaaacaaggagactctccagaaacttgtgggacacctgccctgtctcacacggcagtgcacaccaaagacagtgtctcaaagaccatggatggtgagggccagctccttaattggggcttgcttacaggttcagaagttcagtccattatcatcaaggtgggagcatggcagtgtccaggcaggcatggtgcaggaggagccgagagttctgcatcttcatctgaaggctgtttagcagaatactggcttcctggcagctaggatgacagtcttaagcccacgcccaaagtaacacacctactctaacaaggtcacatctaatctaataaagccatacctcctaatagtgccactccctgggccaagcatatccaaaccattacaggcggcatgatggaaaataggcaaatcccccacgggggtggaaaaaagactaaaatcaataaaggcttgactaatactacagttgcaattgacctaattggcaggtctagaacattccatccaactgcagcagagcataaaaccattcaaaaccattgcaaatgtacatagagcatttgccaagactccaagactggctatagtctgggccagaagattggtctcagtagattttaaagaattcagatcgcaacaagtatgttcactgtggaactgaatgagaaatcaagatgaaaagacatctgaggagtctccaagtatttggaaaccagacatgtgagagcctgtactcaccagccatctctctcgtaaggacagctatcctggaatgaaaggaagtagaactcagtgcagtgagaacctttggaagtgattgtcttatttcttgttgatagtgctttcctttgtttctttttgttttttgaggcagggtttctctatagactatgttctgtagaccaggcctgccagatgcccttagctctgtactgggattgaaggcttgggatatcacccttcttttctatttttatggctatgggtgtcttgcctgtaggtatctcttgtgtttggtgcctgtggaggctagaaaagggtgtcagatcctctggaccttgagttattcataggtatttgccacggtgtcatattgagaatcaaaccctgggcttctgaaagagcaacaggtgcttttactctctaagccatctatctcttcctcccttaaagagcgtttaagcaacctgggggagaaagggcttgtttcagcttatacttctgcgtcacagtcagtcattgaggggagtcaaggcaagagctgaagcagagactgtagagaagcatcactcacgagctcccccacctcatcccaccccttccccagcccccgctctggcttggtcagttatctttcttctatatcccaagccaacttgcctaggaatggcatccgccaaagtgggtcaggccctcctactttgataatcaattaagaaaatgcctcacaaatatggccacagactagtctgatctggatacttgttcagtggaggttttctcctcctaggtgactctacatttgtgtcaaggtgacagagaacattagatgctaaaagtccatcctttgtgaacttaacacacacaaaaagttcactattaagcgatagcttttcctttcttgtttatctccaagattgcattacaatatataacatagtagctttaaatgttcacggtattttaaaaattcaaacactctaaaagtttgatttatctttaaagtatccaaagtttctttaactgagattccatataaaatgaaaaacaggtaaataccttcctactccaagtggggaaaaccaggacataagaatgttcagttatgcaaatccaaaatccaatagtatagctccaacttgtagctcagtgtctaacatctaatgtatgggatggactcacagtcttccagactccaaagatcccgggcagctcttcttccctggctctgctgtctgtaacatcaacagtttatcttataaggtaggctagctgcagtctacacctctcctattcttggtgctcagtgctaggatctccattgcaactgggactgtatctttacccatggcttcctgtcctgccttcagggacgctagccttgccacatcgggctaagcttcagtttctctccataaccccttcaggtctagtttttctacattgaaatgtttactattagtaatagttaagaaaagcaattcagggctggtgagatggctcagtgggtaagagcacccgactgctcttccaaaggtccgaagttcaaatcccagcaaccacatggtggctcacaaccatccataatgagatctgacgtcctcttctggagtgtctgaagacagctacagtgtatttacatataataaaaaataaataaataaataaatccaaaaagaaaaaaaaaaagaaaagcaattcagcacgcctttaatcccagcacttgggaggcagaggcaggtggatttctgagttagacaccagcctggtctacagagtgagttccaggacagccagggctacacagagaaaccctgtctcgaaaaacaaaacaaaacaaacaaaaaaaactgaatcaagaaatacaaatcataacaacagtggattcctccatatacctttgagactttctaaacattttttaaatttgttgtgttgattgatacaagatcttactgtgtacttttacctgttctagaatttgatattctacttagctggccttgaactcacaaagatccacttgtcactgcctcctgagtgctaggactaaaggcgtgcacaccatacctagagagaatgtctacaatttaaaaagactcattataccgaatgctagtgagtatgtagaaacgggaactcccagactctgctgatagtagtagtagtagtagtagtagtagtagtagtagtagtagtacaagccacctggaaaacagttggtagattttttttttttttttagcatgtagaaaaggagtggggtagggcttggatgtattgttattgcctgacttgtatgagacccccaggttcaacctctagcattgaaaacaaaataaaatcacaaatatatacctaccatatgactattccatttcatcctcttttttaaaatatttttattaggtattttcctcatttacatttccaatgctatcccaaaagtcccccataatctcccccccacccactcccctacccacccactcccactttttggccctgacattcccctgtactggggcatataaagtttgcatgaccaatgggcctctctttccagtgatggccgactaggccatcttttgatacataggcagctagaaacaagagctctggggtactggttagttcataatgttgttgcacctatagggttgcagatccctttagctccttgggtactttctctagctcctccattggggaccctgtgattcatccaatagctgactgtgagcatccacttctatgtttcatttcatcctttttacttacttacaaaaagaatgaagtctagaccagtgtaaagactgtacatatgagtgttcatagcagctgtttgtcttattgtgtgtactaggatgcaaacctaaggtcttgagcatgctaaggaactagtctaccattgatctgcatctccatcccagtaccagtttgtttacacactagtgaaccttacctttatattcaagtgcatgcagtttattacatgcctagtttacccaataaaactgttgatggtgcagttgggtttgcaagcgaattacaggaagcactcgggaggctaaagcaggaggattagtccatgttcaaggtcagcctagtgtacattttgtgaatgacccagcttttaaaaaaaaaaaaatccatattagaaggacagtctagtaaacctagtattcaaataattaaaattccaaataggcagttgaaactagaagggagggatggaagtctgaatgaaataatcctcctctagtctttaagataccttatcatgaagtactaaggaacactgggcagagaataccaaagctcttacaggagaataaaatcacagtggcatgcatctctcaacagcagtgaggaagacagactacaaaagagcatcgtcttcacactcaggggggaaaaaaaaaaaacacttacgtatatcttcatgcccagccaaactatctatcaatgttctaatcattaatgtcagcctttgagccctcaaaatgatgctaaaggagctgatgagtaaatgtgtttctcttctgctgttaacagatggccacagagtaagtagttaaggcagcaagagtcgaaggtagccatagcctggaactctgaacccagcctggctgccttctctgcttacagcctcagtattggcgtcagctgggggcaggacctcatctgtggcctggggtccttttttatgctcctgggttattcacagaatcctcacccagtttttgctggctgccagccacccttgagtcctagaggacacaggtaggatttgttttgctagttggctcctttgttccagtttagttcctgaaagccaacaagaaagactttctgttgactgttataaagggtggtgtcccattgcatgtgacctatgttattggttagacaccagtcagcctccatcaaaggctggggccaactggggtcatcatgagcacgtccgctacaatctgggtcaaggaaatggaaactcagagaacagaaagtttctattgattgtggaacaggaagggcccactatggggattgttttaataaccctacagggtgatgccaaggatggatggcgccaaagaaaatgcatctttttcttgaatgcattaagaggtgggttggaggactggagggatggctcagtgaagcctaaacactaaacattaaagccacacatgagcttaatccaagcactgaagaggccagagatgaggaattgattcctgagcagctaggcaagtcaaattagcacgcttgcaggtgtcggagaaagcctgtctcaaaagacaagatggagagagattgaagaagaaacctgaagcagacatctggcctctgcatgcacatagtatgcacacaaaacagtgttggggcaggagtggggggatggggaggggtgatgacctttggcctcccagagaacatgttgatatatagaaggcagatgtataggaagcaccagaaagcattaactcagagacagaagaggtacaaggggacatgactgatatgcaagatggctttgctgtacatatttgcgtatcctaatcaattctgacctaagatagttctgaagttaaagacacaagagaccagtcatggggcatgtggagtgcttgatcctcctcttctatgttagaaagcagaagataaaacctgaatcggcaaagcagagtaaatagaggaagaggaagatatcttagggtttcattgttgtgaagagacaccatgactacagcaacccttttgaaggacaacattgaattcgggctggcttacacttttaggggtttaatccattatcgtcatggtgggaatcatggcaccatgcaagcagacatgttgctagagaaggagctgagagttctacatctggatcggcaggcatcaggaacagagagtaagccattgggcctagctttatgcaagcaaatcattgtatttttcagccaagaatctgaagaaagttaatgtagggtggggaaaaacgtgttgacatttccccatatgatgtacaaggactggagatgatagaaagactgctgtcatcccatcctgaggaggccaaggccaaggattggagttcaaagctagcctgggctagatagtaagatcctatatctattttaaaaacaagtatagagcaagtaactcaatcctggacccagactggtatcttaaaaagaaggctgcaagccaggtgtggtggcgcacgcctttaatctcaacactcagaaggcagaggcaggcagatttctgagttcgaggccagcctggtctacagagtgagttccaggacaaccagggctatacagagacaccctgtctcagaaaaaaaaaaaaaaaggctgcaaggtaatgtagacctccttcatctttgacatagttaagaggggccatagatggtcctgatccagcatgtgttggctagccaagcttccagttggtagacatgctctgggtactcccagctttctttctttctcttcatctccaccaggcctacacacacacacacacacacacacacacacacaccctcaactccatgagcatgcagagcatcaaggatgattcaatactatggaccctctctctatcctgtaaaatctgttaagatttaggcagcttttaaaatctccacagaggagctttgcatcagtctagaggacagaggagaaagacaaggggggggggggggaagagagagaacttaaactgctcaggagctgtggctccctggtacagtgcttgcctggcatgtgtaaggctctaagttcagcgcagcaggggggaaaatagtaaacttcccagcagaaacaatgtcctcacccttccttcctttcttccttccttccttccttccttccttccttccttccttccttccttccttccttccttccttcctgctcctgctctcccctccccaaacaggatggttggtgatttggttaccaaaaagatctatctctgttactttgttatctctgttctgaggcactcctcagaaaccagttattaagtcagtttgtgtccctagagctggcggagagtctcagggcatgccatctgcagatcaaatggctggtgactgagttcggtgccaaatgacaggaaagacccacgaagggggagaggtgcagccctgctgggtgtgcagacagcaggcaactcagtttaggatcccgcttcgtctggtttataattccgtttctgcggggctgccttgatccccattgccttagatattttgtatcttggctcttgagtttattgtaagatttgactgtggtaactggaaactataaaaattaaggagtttggagctatatcttctgctgagggtgacctttagatagctggtaacgcaagaaaaatttccaggaatgtctcaaaatcaataagccctattggtccctgtaaaagaaatgcagtcatggaccagatttccttctgcttttcttatttctgtctctgataaaagtagcagtcttattgtcatgtgtgtgtgtatgtgcatgtgtgtgagagagagggaggagacagatgataaggaccacacgtgttatgacatgatgtggaggtaagaggtcaacctgaaagagtcatttcgcccttaccttcacctggcccagggataaaacgtaagtcatcaggcctgcacaacaaagcaggtacttttctacctgctgggctgtctctctggctgctcatttcttatttcaacacaagtaataaaataacaaagtactgtgtcctgaatgcctaactgggccctgctcttaccttagttcatcttaacttcaaaattatgtccataatgtacactgtgacagtgtacttatgactattgaaggctcagtgagctaactgctcaagggccatgtgacgcagaagtcctgatctggttcccattgttgcccacccctcagacaatccattcacttagtaccttggttctaggtgaatgggcagtctagtcaaggtactagatcctcctggctgttaccagcaacatgatacaaccgtagtgagcatcatggcatctatgtctgcatctagagacggatggaggaaagcctgtcagcctctgcctacctcagggctctgagaagttcaggagtggtgcccatggtggcatagggaaaggccaaagaggtctctgtagcgacccaggggtccatgggaagagccacatgtaaatggcttaccgttgtataccggaaatctctgtgtatctcttgggggagtgatcagatccagcacatgagcaacgaaggagcagttagctcgttagtgtgagtggcctcgcttcagaactttcgtgcttaggttttgctaacgctctcgaggcagttggcaaagcagcattgcagccctaataattataactccttcagcttcccaaaaaggttgtgtgtaggggtgattcggggaggggcagtcaaacccagggcctcaaggatgctagccagggaagcactctgccactgagccacatccccagcccggaaaagtttaactcagtgtgtaggttgtgtaaatgaaaactgtttacagaattctagatggtatcaataatccatacttgatctaaaatagtaacagggaaggtctgggtagttactctataccattttagaaatattttttttttccagatctgaggaccaaacccagggcctctaccacagagctaaatccttaagccctttagaaatgttttctacttctaaggcagtctctgctccctgctgggacatgtttctaaagatgacctttgtaaaagttctagccctattgtaagctaacaccattctcttgttgggggaagggagggtggtatttttgagacagggtctctgtagtcctgactgtcctagaacttgctatgtagactgggctggcctcagacacacagaaatccacctgcctccggagtgctgggattaaaggtgtgcaccaccatgcctggctgctaacaccattctttttttttttttttttttttttcaaagatttatttacttttatatgagtacacaccagacatcagacacaccagaagatggcatcagatcccattacagatggttgtgagccaccatgtggttgctgggaattgaactcaggacctctggaagagcagtcagtgctcttaaccatgttaccannnnnnnnnnnnnnnnnnnnnnnnnnnnnnnnnnnnnnnnnnnnnnnnnnnnnnnnnnnnnnnnnnnnnnnnnnnnnnnnnnnnnnnnnnnnnnnnnnnnnnnnnnnnnnnnnnnnnnnnnnnnnnnnnnnnnnnnnnnnnnnnnnnnnnnnnnnnnnnnnnnnnnnnnnnnnnnnnnnnnnnnnnnnnnnnnnnnnnnnnnnnnnnnnnnnnnnnnnnnnnnnnnnnnnnnnnnnnnnnnnnnnnnnnnnnnnnnnnnnnnnnnnnnnnnnnnnnnnnnnnnnnnnnnnnnnnnnnnnnnnnnnnnnnnnnnnnnnnnnattaaatttgaaaaggaatcaagactaaaactataaagtagaacttccttccctggtctgtctctgagcacggttgccctcctgtttctcagcagcttatttttttcccctaatagatcatatttgccaaggagtgagcccattggacttatatacagaacgggcctatggcaattgttcctgtcactctacttcccttatttagaaagcatcccacccccgagttactaatttaaacttacaatctccccaaaaatcaaattccagaattgggcgtgtgaaacaggaggctacacgtgggggtgcccatgtaatcccagcacccaggagataactcatgtggtttctccctcatgtttgtgcatagagcagagtgcagtctctggtgaagcctgaagcctctaggttcatctgctaaggggttttccgtgccttgggcaattgttaggtggcgcagggtggggctggcgagttctttgagtatttttattatgtatatgtcatctctgcatgtatgactgtgtaccatgtacctacctatatccatggagaccggaagcaggcattagatcccctggaactggagttatagaaagccatgagtcacccaggtcctcagacttagcagcaagcgcccttaccactgagccatcccacctgccctcacatatgtttctaaacattgttgataaaaagtgtggttccttgtggtccagaaaaatttgagagattagtcgtagttaaaatcaggttcttgagcgggtcgtggtggcaaacgcctttattcacagaggcagaggcaggcagatttctgagttcgaggccagccttgtctacaaagtgagtttcaggacagccagggctacacagagaaaccccgtctcaaaaaaaaaaaaaaaaaaaaaaaaaaaatcagggtcttgaagacaaaaagctttttttttttccttcaacctttgcacaagaatctattaatgtggcatgacacgcccagagatttaatggctcctcgtttattttaagcgggacagcacacaattagcacagagccccactgaccccgggcctgtagccagaggtcaattcccaggcgctctttcttctgtagggctgtaaggaatctagtctaggagctgcgccctgatggccgtttgttactggtggagaagttggtatgagtgtcacagttttgcttaccataactccacatcactcttcctcagcaggggagctcttgctctacagagccacctgtgggttctggtctgttgtcccttatcccaaataagtagtctcagaagcgattgctgcatcgttgggaaggaatgtggtaattttgccattccacacatgtctctcctacttaaataagctgaaagtggaagaaagacatctctcacttcctgacgcttaatatcttggctagttttatgtcccaatactgtgaccgaattacaagacacatgtccactctcctttcaatagagtaacgcagtagtaaccagagaaactttgattccgtgctaggagcctgccttttaagaaagcaacctttaaaatacagcagagccccagccactaagtcaggtgccacagtttacatttagttcattgtttgagatccagggtgtcattgcccactcgtgtgtgacaaagggcgccttattcccgtctgtgctcagaggcctttgtagccgtgatactcctacactgcagtcctatctacatagcaccacgtgctgggccttctctttgccctgcttcagcctccacactccagggccaacagggcagagtggtcagtgagaactgcaggggggcccatgggtgccccacctggccagcatataaaggagattggcactaaggtattaggctcttctgagatgaaggagtcacaaggaaggactgtaggcaccatgtgaaacatggtttctaagccatactgtgtatctgtgtcgctgggggcttgctgtggtcccaggctcccatccagcagacctatggctctgagttcccaccaggctcctgggctactgctgctgctgctgctccacagccctggctaagtgaggagagtccgtaagcagagacaggagtgagagagggcagcacggggtaggaaccacattccaccttagtagttctctgcagagaatggtgggacgggaagaagcagagccactctgcaggccatcttaggaagagtgtctggggaccagcaaggtttctgcatgacacagaagtcaatctggcctctgaagagccagaaaccagctatcacctctgcctgacggacagacagatgggaccggaagatgggtgcctgttaaagcaagcgcaggagaccccgaatcctgagacacacagcacagatcctgcgagcagtgtgttaatatggtaacctgcgtgctttcttgatacacttgggtcttctgccacaggggacaaaatggcagcactgaaggtcttggtttagcaaaacagtaaagaaccggattctgccctccgctagccatggccaagagtacttcccttgataacttaatgtcctctcaccttgctggacatagacctgtgatctgaggacttgggagatagtcacagaatgatcaggagttcaaggtcgtcctgggccacatgaaactatttggggggggggggacagttcctggcaacccacatacaacaaaaacaacaaaatttaaaaatctataaagtcagatgtaagaaagtgtctacgtcagagggccctggaaggactgaagctggctgtcatccatgtaaaatacacagagcaccatgaacatgtcgagcaaagtccaaaggctgtgtggtacttagtaccttagccaccttgacagtataacttaccatccctagatctcaccacctcccccatgtgccatggaaatcatataaatgcctcttcaaggttgttaaggaaggaaaatgggggctcagtggttaagagcactgactgctcttccgaatgtcctgaattcaaatcccagcaaccacatggtggctcacaaccacccgtaatgaaatctgacgccctcttctggggtatctgaagacagctactgtgtacttacatataattataaataaatcttttgagggagagagatagagagaaggagagagagagagagaggagaaaatgcccagtggtgcaaagcatcactcaacacaggagttcctgatggaaggtaaagccagctgcctgctagctaaagggcaagtttgcactgtgcccagcctctagtacagtttgcaggcttttgctttgacaaaaatatgtgcatggtcttggtgaggaggcaactctggccccagccacaggggctggttttgggctctgtaatgcaaattggaataggaagagaagctttgaaaatcactggtggctgctgtgtgcccgtgggaccacagggaatatgaagaagctacatttgggggtgaggggtggggtgacatgctttctgtctgtatgtgatttctttgcagagtgtgaaggcagggggcaaactgacaggaccgcctgtgtccataacggaatgttatatgtggctgtcatgaattgcgtggttggtttatggctagtggaccatgccgtgattaatcacctcgtgaactttgctcacgtgcaatgttttgttttctctttcagatgagcacaatgccaggactgcccacccgaccctgcttttatgatatagaccttgacacagaaacggagcaagttaaaggcttgttctaatggaatgaaacccacaggactgggcaaggtgagctaccatgatttgggtcttgttgtcaacttaaatgatgtcttatgtcatttttttcttgggtttgttataaatgcaatcaaacaagtaaattgttcctaggtcactacacagtcatacctaatagctgcctgtgacttggggcccctcccaagcgcaggcatgccctctgtgtatctggagtgaatcctatagaagttggatcatgaatgtgaacttgagcagagcgcctctaattgtagcaaaagctggtatctgccttcatttaagactgacttccaccgggcagtggtggcgcacacctttagtccctgcacttgggaggcagaggcaggtggatttctgagttcgaggccagcctggtctacagagtgagttccaggatagccagggctacacagagaaaccctgtctcaaaaaaaaaaaaaaccaaaaaaaaaaaaacaaagactgacttcctactttattaccccacatctgggtacagagttacagttgtgttagggaaatcttgggttcatttcccagggctgccataacaaagtaccatgaactgggtgggttagaacagagctgtgtcttgttgtcctggaggctggaagttcagggtcaaggtatcagttgagcaagcatcctatgccctctgaggatgtcaccgcatagtcaccactatataggtgtgtccctaccatctctgcctctttggtcactgactttctcctgtgcccctggcttcctgaggctttctcttgttctttttagtttgtatgtgtatgtggtgcagctgctggttgttttcagagagatttgggtttttgagatgagatctcactaaatcgctcaggctggtcttgaactcctgatcctcctgcctcaccctcccaagtgctaggcttacaagtacccaccaccacacctagcactttgtcctcttctaaggacccnnnnnnnnnnnnnnnnnnnntcttgttctttttagtttgtatgtgtatgtggtgcagctgctggttgttttcagagagatttggatttttgagatgaaaactcactaaatagctcaggctggtcttgaactcctgatcctcctgcctcaccctcccaagtgctaggcttacaagtacccgccaccacacctagcactttgtcctcttctaaggaccccagacacatcagattcaagctctctaagactttgggggtgagggggagagacaggttttctctgtgtagacccagaactcactttgtagccaggctggtctcaaactcagaggcccacctgcctctgcctccctagtgctgagattaaagacatgtaccaccacagactttaaagacatcttgattattctgccaaagaccctgtttccaaatgcagccaatcactatcacaggtgcccagggatagtgctcctacatacctttgggggaacataattcagctcttgactgtggttggggctcttctgcctctggaaggactaatacagacgggcacgggtctccctagacacgcagggtattagaaccctttctggactctggcccctcaggttaagaaggcagactttttttgtttgtttgttttgtttttttgtttttgtttttgttttttgagacagggtttctctgtgtagccctggctgtcctggaactcactttgtagaccaggctggcctcaaactcagaaatccacctgcctctgcctcccaagtgctgggattagtggaactcactttgtagaccaggctggcctcaaactcagaaatccacctgcctctgcctcccaagtgctgggattagtggaactcactttgtagaccaggctggcctcaaactcagaaatccacctgcctctgcctcccaagtgctgggattagtggaactcactttgtagaccaggctggcctcaaactcagaaatccacctgcctctgcctcccaagtgctgggattaaaggcgttcgccaccacggcccggcaagaaggcagacttttattctaagctttttacatcactgagagcagagggatgtgggctgtgctgctgtgtgtcccaaggtgttgaagcactacctgctggcttctgccctggctgtctatatcaagaaaatgatacgaatcttcctgcctgcaactcatagacagaagttgtgatggcttggagctccgtttacatcccatagatcaatatgtcctcactgtattcccaaagtccagtctccatcccccacccccacccccggcccaaacgttcaatttcatcccttagcccagaaggggcttcttggcatcaaaccctgtcctgggcctttggccgggtttctttgacctaaatgtgcttcaacacctgtgtgttgggaccctaggtgggatgcagagtttcttctccttcggttgcagctaacagttttatggggtttagggagctcatgcttgtgcaaatgagaggacagcctctgagatcctcttcgggagttatgtagtttagctattgtttattttaggtagggtctcctactgacctgcagctcgttaagctaactagactaagggccagggagtcccagggttcctcctatctctacctccacagccccaggattacaatcacatagcannnnnnnnnnnnnnnnnnnntctttggtcactgactttctcctgtgcccctggcttcctgagctttctcttgttctttttagtttgtatgtgtatgtggtgcagctgctggttgttttcagagagatttgggtttttgagatgagatctcactaaatcgctcaggctggtcttgaactcctgatcctcctgcctcaccctcccaagtgctaggcttacaagtacccaccaccacacctagcactttgtcctcttctaaggaccccagacacatcagattcaagctctctaagactttgggggtgagggggagagacaggttttctctgtgtagacccagaactcactttgtagccaggctggtctcaaactcagaggcccacctgcctctgcctccctagtgctgagattaaagacatgtaccaccacagactttaaagacatcttgattattctgccaaagaccctgtttccaaatgcagccaatcactatcacaggtgcccagggatagcactcctacatacctttgggggaacataattcagctcttgactgtggttggttggggctcttctgcctctggaaggactaatacagacgggcacgggtctccctagacaccgtgcagggcagggtattagaaccctttctggactctggcccctcaggttaagaaggcagactttttttgtttgtttgttttgtttttttgtttttgttttttgagacagggtttctctgtgtagccctggctgtcctggaactcactttgtagaccaggctggcctcgaactcagaaatccacctgcctctgcctcccaagtgctgggattaaaggcgtgcgccaccacgcccggcaagaaggcagacttttattctaagctttttacatcactgagagcagagggatgtgggctgtgggctgtgctgctgtgtgtcccaaggtgttgaaacactacctgctggcttctgccctggctgtctatatcaagaaaataatacgaatcttcctgcctgcaactcatagacagaagttgtgatggcttggagctccgtttacatcccatagatcaatatgtcctcactgtattcccaaagtccagtctccatcccccacccccacccccggcccaaacgttcaatttcatcccttagcccagaaggggcttcttggcatcaaaccctgtcctgggcctttggccgggtttctttgacctaaatgtgcttcaacacctgtgtgttgggaccctaggtgggatgcagagtttcttctccttcggttgcagctaacagttttatggcgtttagggagctcatgcttgtgcaaatgagaggacagcctctgagatcctcttcgggagttatgtagtttagctattgtttattttaggtagggtctcctactgacctgcagctcgttaagctaactagactaagggccagggagtcccagggttcctcctatctctacctccacagccccaggattacaatcacatagcactatatctggaaatgtttgtctgtaggttctgggactcgaactcagatccccgtgcgtgcaaagcaaggacatcattgagtcatacgacaagtctcctcactgtttcaagtttggggaagttccttctttggctttagatttttttcctataagatttttaaaattaatttaatgatgatctgggctctggtgcaaaagattagtgaggaaccacttaaatggcctcatgttgaactgaggtgggaaatgccatgagaacggcgtcggtgcctgcgtgtttcttgttgagaggtgggagctcttgtgactctcagtcacagccatgtggcttgtcttcatcatcctgggaaagaaaaccccaagaaggaaatcagatgagtattgaacaaagggaccatgaacctaacctttggtaacagtgctattcttggtcttttattgtggctctggtctcccagcaaggcctctggtaaaatgacagtattgtttcttttagaccaaaagttgaaccttcccctgactaatttctttccaagtaaaggatcccatatatggcacatctgccatttgtcaccagaacaggtgtgcgcagatctgtcatctctagtgaacggtattttctccagacttttggtcaatttttatttgttctccaagtaagtcatatactttcattaatatggttaagactgaggtaatgtcagggattctgtaccaatacatacacctaaataaatttcttgtgacttgtcacccgtgtcttccctggcaagcatccttccagattttttgctgaagataaagcaatccaggaactcaaggtattagtccttgcactcttggaggtggaggcaagatgatcaaggtttcaaggtcatcatcttggctatgtagtgagttctaggtcaccctgggccacacaaaccctgtctaaaataagtaaggagctggagaggtagctcaacagaggacctacgtttggttcttagcacctatattagaagggctcaaaaacacttgtaatctaacttcaaaggtctgctgccctcttgtggataggatgggatgggataggatgggatgggatgaacacacaaataaaatgaatctgaaattacataattaaaatcgatcaggggtctgtggggatcttctggcatgccagatactgtactcagtcctagcacagcgagtgttgtcccagtaaatcagaggcttcaagaagattggtcctcccgacatggtctcagagggatggtggctgaggacagcctgcatccccactgcatagcactgctctcttagccaccagcatgtattgttttgccacaccagtcaactagcatggagagatccagccagtgagcccttgtgtttcaggactgcaacatcagacccagagaggtcaacatactgcacagctaatggctacagaagctaagatccaacccagattagccagcttacagtgtgacacagcccttacacccattccctacaggaacttaggcccattccaaaagatggtatcagctagttaatacgtttttgtttttgtttttttaaataaccgaaggtaagtatttggatattcaactctcggtctaaaaaggacttcagtgtggtgggacagcctcttacctcagcctctacttgaatagcattgtttctcatctctccaacactaaatgtgaaatgacgaaacttcattctaggcttcctgggcagtagttcaaaacccatcatttgaccctgctggaacaattgaaaagggatctggtggcctcagataaaagcttttacaaataaccactcctctccttggctcctgtaaacatattttctgttttccatgactctccaaagtggcagtccagaaccacctctatgaatatccagagagggctgtggctggtgaaagtgcataaataaaaaacgtttcgtcttggacagcactccagcgtcagcaatgaacacgctttgccttgtcataatttagtggcacagcgacacagggttgatcattgtaaagcctcagctgcagtgcagaacagtcaccatccttcgaggagcatggtagacacttgcacctgtgcccctcttgggaacaaagggatgctaatgactacttttgcttcctcccctttcttgcccttcctgcctccctcaatttccctccatgagatatcatgagactgaatgtgaacgtgagatccaaggagtccccaggacttgagctcagcctcctccctttgtcccaagacttccctgtagctcttttgctattgttagcatgagctgtgactcattcttttggatgtcactaaatagaaatctttcaaataaggtttggcctcatgaaatccatcccgtgcttgcaatctcttgccacgaggtgtttgtgtttcatggggaggggtgctgtgctccctttcttctgggttcttgttctccaccttgatcatatttctgagcctccaaacgatccatacaagaaagtccagcaacttactgaagaaccagggctgccctccctccaatgcgctgtgtgatgtttagtatgcattgggattcattgtggtcccactggagatgccagtgtctcaccagaagtctcttttccagagttctacccatcgaaggaaaccccatctcagctcgcttcttccctaatatgcctttagggaggagaattcccaagctaatgactgatcaaaagttcctcctgagtcaggtggccacgtgcattccttcctgtggacagacctgatcgaccccaactcctatagcaacggggagcccatggcaacacctcagccctatgatttgggttttgaaatttatctttttgctctaccactaaagtaagcacacatttattcttttcccttccaggcaggagtccaaggaaatagcagcccttgctacttaatcctttctggcatctgatagctattgtgactaagtcttccatatctaggttaggtaccaactcttaccttcttaatcctcctttagaggaacctcgaggcacaatacacttactgaaatgggatagctcataaatattttggactggggatgtagctcaatagtagaccactcactcacccagcataagctaagccccagctttcatctccatcatcacgtgtgcagagtactttatgtatttcctacttcttcagtatgttcccagtgggaaaacttccaaggttgtttctccttaaattagtctcttttttgttgtttttttgttttgtttttcaagacaaggtttctctgtgtagtcctggctgtcttggagctcactctgtagaccaggccggcctcgaactcagaaatccacctgcctctgcctcccaagtgctggtatcaaaggcgtgcgccaccactgcccggcatattattcttataatgaattttttgtttgtttggtttttgttttgttttgttttttcatttcaaagcagggtttctctgtataacaatcctggctgtcctaaatcttgatttgtagaccaggctggcctcaaactcacagagtttgatcatgcactgtcacgtccagctaataataattcatttttacattttcaccttagctgttgccccactctcattttatctttaattagactttgcatggttttaccaacccataagctttccatacacgcgggaccattgcagaggccgtggtgcatgtctgtaatccacatcttgaggaggctgaggcaggaaggttgcaagttcaggcccaggctaacattgatcccatgtttcacaaaagaagcacggaaacacagactcttctagacacagaaccatagggcacaagggcactgggttagccaaccaatcttccatttcacacctcagcaacctcaaagttctcacagcgctgagggtgtgccccgcccacagaaccagccccctcagcccagcaataccttcccctcctcgggactcactggtcactacaataaggctgctgtgtccctgggtgaagagccaggacctgcaccagacagccctcttaatgggacgttttcttttcattcctggttgttatactgactgtgtttctgtcttctgtttacttgcctgacttggaccctgatgtcgagaggtatttgaagttctgtcctcctctccatcactgtcttctgtctttaaactgcccgggcatctccctgtctccagtctgcagttatctgtgggaggcaaatctacccagtgtcagcagagtgaactcttttggtccacaaataaacccctccgtgtgtaaactcagatgaaaggctgcatactggcatttacagttttccctggagtgggagcctgttttcttctggaacttggttgttttgcttggttattgtttttcagatatagtctggtcactttctctctctgaaagattgcagagagctgggaatgtggtgcatgtctgtaatcccacagcttcagaggtggaggcagggggactgggacaacagcctagactatgtagcaacttcaaggagaacctgagttaaatgaaaccctatcaaaaaaataaaaataagataaatgaacacattttttaaagttagaacttgttctctatgctctctgtatgaaacaggagcagaaatctaaggcaatcagattgtccctctaacacctgtaacagtccctggatcttgcataatgtacagcacaaaatctgcaagtcatagaaattgtggagtgtcttggaaagtggagaggccgccttgagggacagcactgacttgtggttgtggagcactacatctgagtctcgctgtgtgtctgtttgggggtccacttatatgtgtgcttatacacacatgtggacggggagtagaagactaacgttgggtctcattcttcaggtgatataccagggttttgttttttggttttttgttttttgttttttttttaagatttatttatttatttattttatgtaagtatactgttgctgtcttcagatattctagaagagggcatcagatcccattacagatggttgtgagccaccatgtggttgctgggatttgaactcaggacattctgaagagcagtaggtgttccttaccactgagccatctctccagccctgatataccagtttttgatattggactgaagcacactaaatagacaaggctgactggccaggaagctctgcctaattctctgccctaattctcatttcttacacagaaaacagctcacacaagaatcccagcctttaaaaccacaacacaagtaagagtttaacaccagaggaaaagacgacttggctctgagaccccaccccctctttttcagagtcttcaaacaaaaaacgtctccttgcctttttgctgcagttggagaagaaaatgaattttgaaatcttgtgatgcaatgctggagcaatcctgagacaggccaaagaccgcttcctcatacaagattaactctgtttccagccaagtggtgttcaacagaaggacctgcgccacatctggaaggagtgaagttactcttggttccgatagtgtttacaccatttctgctgcttatactttagaaagtttattttatggggactagggctttgcaagagtgtgaactaaaagctaatgcttccgtctttggagttttctctttcatcttttttattcttcctttcctcacctgtgttgaggatgggatgtcaggcctctgcttgcaccgtccagcgctgtgctgccaaactgtatttgtttttgtctttgaactgaaaataaacatgtgttctagaaaaccgtgttcagctagtaaagccactcactgatgtcactgtccttgtgaagccttgggttgtcacctggcacatttgtggcagagattgcaagtgcattcggagctttataaatgacaagaagacaatcatattgagagaaatgtctaggcagcccagactgtggaagcctggctggtctcctggagcaaagtgcactacctatccacaatgacttccgggtctctgtgaagtctctttccctaaccctaacctcttccaccatgaatgaatatcaatggccattcaactttctggtcccacgggggtagaagagtgcctcttaaaggtcaggtgtttggcaaatgtttttcctttggcccaaatgaacacaaactagagaacgttctatgacccgttccctactttttgacccttccttgtccctccattccctgccttgcaaaaatataaaattatgtagaacttaaaacaaaaccaaggattcagaaacaaacaataagtgattgtcctcgaagcagcataagtaaaactgtcaccataaatatcctaaatatcccggggcacatccttcgtgatccttcctgtctgcccttacgatacccattccagtgaccctgctcagctcataatgtgtctttatgtacagttttgcttgttccaaaacactgtttgaaagccaaaaggcccactcagtgcctttcctgagtgtaattttgcttagcgattctaaggcgtccttccttgtctctgccctttcttagggagtccacctctccagattcacacttaccctgtcttcacaatacttacacccatgtgatgggtaagttctctacagaaggtacccagaaaacagcagctcctggtgagctcatgtttaaggagtcccagtcacagagctggcaagatggttcagtgggtaagagcactgactgctctttggaaggtcctgagttcaaatcctgacaaccacatgatggctcacaaccacctgtaataagatctgatgccctcttctggcatgtctgaaatcagctacagtgtacttatgtataataaataataaataaataaatcttctttgggacagagtgggcagaggtaggtccaaaaaaaaaaacccaaaacatcaatttccaacaaccacatgaaggctcacaaccatctgtatagctacagtgtactcacatagatagatagatagatagatagatagatagatagatagatagatagatagatagatgatagatagatcttaaaaaaaaaaaaaggagtcttagtcacaggctctcccccacctcccaatatggttggtcacctgcagtcatgcctttcctgctatatgaactgtgatcccttcaactgtaagccacaatacatcctttctttttccttaggttcctttgtttggtgatttagtcaccagggcaaaagaggtaactaatccaatctcctatatagaaaaacagtttggagtcaaattgaagagctaagcaaaatgtccataacttgccagtttcctaaatgcaattccgcaatggaagaaagaaaagatgtcacaaatcaggagacctcagctgcaccttcaaggtgaaaactaaaccaaatccgtagctcggtcacccacctgtggtctcagctttgtcatctggaaccccctgctctcctttctctgtgctacttgagccttagttaggcagttccacaggtccagtgcttagcctccaaacctagcatggccgccccgactccaaggttatgtgtcttctgttttagctacagtggtctgcaggaggcagcaataattaatcaggctctgtatattcaagctgtttgccccctatgtagtaagtgaatatagataatctttctgcactgttaatagtagaaccttcccccaaaacatttgggctaatatttacattttcacaagctttataatcattacattagaaaagctggttctaaaaccatctttattagagttaccagagaaatccttttttttttttttttttttttaaataaaatgaagctttttctggggatgtgactcagctgatagtgtgcctgccaacccattcaggaagcccagagctccatcctcagcatcacacaaaaccagctctcaagaggtagaggtgggagaatcaggagttcatggtcaacttcagctaatttaaggctagcctggactacgtgagactgtctcaaagatagataagatagatggatagatagacagaagatagatagatagatagatagatagatagatagatagatagatagatagatagatggatggatggatggatggatggatggatggatggatggatggagggagagatagatagatagatagatagatagatagatagatagatagatagatagatagatagatagatagatagatagataatgaagcttgcttctcctttttgaagtccatatgcccctggggatttttatttttaacacatttactagataattattccccaagctaaggattaagaattaacctgacctccactttcacatcatcactgagccagcacaatactaaacacacaggaggtctaagtaaatactccatgaaaggttgaatgatcactgatggcagcaatgtctggcccagcgccacccctgctaaatgttcctgttacagccctgtcccttcctctctccccttcacagcaagtaactcagccgatcgcccgagctttcttccctaggatcccaagtcccccaagcctaattcctttacctgtgtttgacatagggactcactctgtagaccaggttagcctgcaactcgagattctcctgtccctgcctcccactgttgcccatacccagctcccaacttacttatacgactccttagaaagattcatttaacagcaatggagagatgaggtcatatgagttccatagctcccatccccacacctccgaaccttgtctaacaagtcaccaagagctgagtagacagacactcagacaagacatcaacacagcttggaggataaaagagagaaggctgaggaaaggctccccagaaatggctctagaaagcatgaagggaggcagcaggagctccctcaaagagcagacgctatatctacaagcaaggctttgcgcctacctgtcaagggcttccctctaggttttgcgtttaatttttataaaaatcagattctggtaaggcttcccacaacagtctagccaggcctcttgagtactcatctcgtgattaagatgagactaaaggcaaatttgttccaaaaatgggcctgtgccccatctctggtttgggacaatccaactcggaggagagcagcaagagcactctgcccttgcccgaggttacagtgtttatgtaacaaatcagctcaacttaaatatttctcatcgcttgtcagggctgcagacctctgcccggcacatcaacatgaatgtcatgtgtttatgtagccctgtgtgggcatctatgcttatgcaaaaggacctcaagggttcaaagccagttaatattttcaagcatgcatcatgccgcttgcatgtttgctataaagatggcaaagagacaatttctcaaaaccaccagactgagtcgatttgtgcgcacacttgagagcagagtcatttaatgaatgtgtgtttggcaaagtcttacaattaaggaatttttcttcctcggtaattgcctgggtcctgataattctcctctaagtcagtctcctgatgagcccccgccttgaaagagacaatgtgtaccagacaaagagcagagacagacacggtgagagaacatacaggctctcctgggctcagaacaagccaactagagaaatgctttccaatttcagcatggagtttggagccaaaggagtttacagggaccagggggaagtggtgcactcagcacagcatcccctcctgcatcctccctttcctttcggatgcatttagggcctcctttgaagatccgagttcccagaatatcccaagtacctccaacctcaaacagagtgcagagattagtccaaagccgagaagaaattatttttaaattattcatactaccttgtttgtcattagaacagataattgaagtaactgtaaatatgtatacacagaagttgacagaagagaattatccacagcaaactacagatggacagagaagcccacttaagtactaaataattagagaggctgggagccaaggatggtgggaggtcactaaggagtgtggaactgggacaaagctggaagcggcaggacgtgggacacaggagagggacgctggtggtggagcaggggctggaagtacaagccaaagagcccggcttatgcagggagaaagccgtgcacagtgggttctggtttctgacaagtctgaactctgagaggcggaagtgacagatagagcctttgacaaaaagcaagtgcaggctgtaggagacatctcagctgcccagcctggactggccgcactgcagagctagatgcaaaggttccccgaggcatggctgaccttgctccgctctgccatgcagtcagcgttagcgactttgtttcatatcactagtacccaaagaatggagtgtggttgtgtgtgtgtgtgtgtgtgtgtgtgtgtgtgtgtgtgtgtgtgtgtgtgctcgcttcatgcatgcatgagtgtgtacgtgtgtgtgtgtgtgtgtgtgtgtgtgtgtgtgtgtgcatgtggtttgttgtttatttttcaagatgctgtcttggaacttactatgtagaccaggcaggtcttgaactcagagatccagagacctgtctgcctctgcctctggagtgctgggattaaaggcatacacgacaactgcctagcttacttaaaaagttttttaaaaataatttttaaagctaatttgttccacgttgttaaaattcttttaagttcataaatagaagtcatgtagataaatgttagctatggccattcctataatgtaatatctccactttccccagctggaaaggagggctggggagggcaggggtagtagactgcgtatagggacagttgcataatggacgtgagtctttctgattcgtggttgtttggatctctggttgtgcagcttgcaaatatggcgtgtttgccgcccttcattctctaagccctgctaccaccaaagtttnnnnnnnnnnnnnnnnnnnngctgaagaaggtgggattgggtattgaacccagagcttcatgtgttcttttttttttttttttttttaaagattcatttatttatttatttattatatgtaagtacactgtagctgtcttcagacgcaccagaagagggcatcagatctcattacgggtggttgtgagccaccatgtggttgctgggatttgaacttcggaccttcggaagagcagtcgggtactcttacccactgagccatctcaccagcccgtgttcttttttttttaagacttatttattatatataaatacactgtagctgtcttcagacactccagaaaagggtatcagatctcgttatggatagttgtgagccaccatgtggttgctgggatttgaactcaggacctttggaagagcagtcagtgctcttatctactgagccatctcaccagcctgcctcatgtgttctaagcaagctgtactactgtactactaagctacctgcccaataatagcagcatcagaaagccactgtctaaggggctcgatttgcctaacatgttgatccagtcattgtgcattgaaatgaagggttttactgtatgccacaaatatgtatgatgtttgattcaaagtaaaactatacaggttttttaagtcctcaaaaacgactctttcctatagtgaacaaatggtgatttggaaaaggaaagatgcaactggctacggtttggcattctcctctttaaaagaaaattaaaacttgggttaggcatggcagcacagcgcagcccatgagagattaagaaaagaaaacggagccgggcgtggtggcgcacacctttaatcccagcactcgggaggcagagggagagagagagagagagagagagagagagagagagagagagagagagaaagtagtcatttagtacacaagttttaagggtaaaagaacactgtggccctccaagttctcagcctcacccaggacctttgcccactacaaagtgttcccactcaacagacgaatgtgatcaacaaagagaaaccccactgtaccccagcagaatgggcagacaacctgaaaatgaagtccaggattagccagtggtattgatccatctgggaggacaaatgaaatccaaaaggctgtgcttttaaagatttttgtagtggcagcagagcttcaggcagctgtccctcactggcacaggtatctgattccacagatacccagagactgcataccaggagcagtctgcacagagagctcagggcctacaaacactaacaggaagcaggaagcaagcgatgtccatggacagctatttccttagtgcctcctaataacattactgataaataacattactgaacgataacctgccaaccattcagacattttacacatactatttacagaagtaaatacaaggttcatattttttcccattttatagttcaggaaattgagtcttgcacaataaggggaccttacctcacaaggggcccaagaccttacaagtgacacttctgggtctcagcatggtctctctgaccctagagccatgctcaaccccactgagcacttactgcagcctggatccaggttgggataaacgtgttcagagagatgaaatttcgttaaggtgcttggaccaagacccacccagcagcttccaggaggagttggaaactgagagggaaaagtcacctctccacagatgatttgaagttggccttaactacagaagccaggtatgctgacatagacatgtaatcccagcactgaggcaggagaattgctgtgtattcgaaacctgggtgctgccagagttacataataaacaaaggagtggggggaaatttaaaaatcaccatagcgtgaacagcagtacaaccccttacaaggcctccggtcagtgcatgcccaaggaaccaagctacaactgccagattgtctctgccatgcccaggctccatgccaggcactaaaacagaaaaacttttaaggactaatcactcttgctctcttctcttctcctctttcctgctcttgctgcttaccctcttcaatctctctccccattcccctcccccttctctctccatgtgctcatgactggcctctcctcccccccccctctctctctgcctttctctgtctctactccttcaatccccacccccatgcccatgccttaaataaactctattctatactgaaaaataacaaacttttaaggttaataatcactggttataatcaatttgattcagcctaattaaactgaaattttaatagggtttcacagtcaattagtgtgtgtgtgtgtatgtgtgtgtgnnnnnnnnnnnnnnnnnnnnagggtcagtgacctggctcatcaaggtacttgggaaggttttaatatcaacttgctgcaagttagaaactcttgagtaggaaacctcacccgaaaaattgtcccaattgccttgattgacccaccccagttctgtgcagcaccttctggcagcatctgtgataaactcccttttaatctctccagttgcctgcttggccctgcctcctaccgccatgtttgatttgccccgtggcagctgctgccgctttcccaggtaacagaatcagaattcccaagctttccttgtgggaatagggaccaccggctctccaggaactttctggggtttcccatgacagcctgggacacctgtcttgtgaactgcataactgtgggttctatttctgcagagaacctgcccaaacactgacgacccgagttcattcatagtcagagaaaacaatcaggttttgcaagctgccctttgaccttacttctgcgctgtgccataaacatgccccccccaccataagttcattaatttttcaatattaaagaaatagtaaaggacagtgactgcaagcatcttatctcagcatttaagaagtagaagcaggaagatcaggagttcaaggcagcctcagctacctatggaaaccatgcctcaaaataacaggggaaaaaaagattgaaaatacatggccaagaatataattgacagccgagttgatggtacaagtatgtaatcccaccattcaagaggaagatgtgggaagatttgagatcagtctaagcaaacaaaaccaaaaatctaaccaaatagcagggtggtgcacacctgtaactgcaacacttctgaagttaaaggcaagatggtcagaaccttatagagatctctgacgacatagtgagtttaaggctaaactcaaaacaccagaataagccaggtgctgggcacgcacctttaatcccagaactcaggaagcagagaagcgggtggatctctttcaatttaaagctccagcctggtctacagagcaagtttcaggacagccaaggctacacaggaaaaccctgtttagaaaaaaaacaaaaataacaaacaaaccaacaacaacaagggaaaaatacaaacatcaaaataaaaagaaacaaaccagggatttgtgtacccactgagctccgtccccaagtcctgttccaatgttaaattcctttctcacttagcagacgtgaccaagctagcggtagttcggctaggaatgatctccttggggagaacagtgccagatcaactggcaaggctagacttggactcaaacccagttccttgcttcctgtctttacactcgagcagatgtttatcctgagaaggacgtggcttccacaccgcccagtgatatgaatgctttgtaggattggcagggactacggagataagtgtccataggaagctattgcttattttctaattagggacgggtggggttgggtatgtgcactggagttacagatggttgagcctcctaacgtgggtgctgggaaccagactaaggtcctctgcaagagtagtacatccgcttaaccagtgagccatctctccagcctcaaactattattgcaatcagaacaaaattgcattatttcaaatgagagactgggttttagaaatcacttttaaaagagagagagagggcgagccaggcagtgtgatgcgcatatgcctttaattccagcactttggaagcagaggcaagtagatctctctgagtttgaggccaaccaggtctacacagtgagttccaggatagccagagctacactgagaaaccctgtgtctaaaaggaaaaaaaatctctataaaaataaaaaatgactaagaacagctaacagttccaatgacagatgggaggaagaaggcctccataagaagaacaccgcactagatctcactccgtagccctggctagcccagaactcattatgtagaccaggctgaccttgcaatcccagacaaccacttgcctctgcttccaaagtacagacttgggagtttgtaacttcctcttccagcatcaaaaactttagaattttaattatccaagctttttgctttttgattcttcagagacaaatttgtctctctgtgcttagcagcattattgccagggtttgattaaccatgtttctggtgtgtgtgtgtgtgtgtgtgtgtgtgtgtgtgtgtgtgtgtgtgtgtgtttgttgagacagggtttctctgtgtagctctggctgtcctggaactcactctgtagaccaggctggcctcgaactcagaaatccgcctgcctctgcctcccaaatgctgagattaaaggcgtgcgccaccaccgcccgggatagctatggttctatttatggggttctaactcaagctaatgaagccgcct

SEQ ID NO: 1193 - DNA, 3573 bp, Mus musculus
tctttcctgctgctggccctttactgtgccgcttggctctctggtgcctcccacgccagcccggggaagaacttgcagccgcatctcggcgcctggggataaccagtcaccccgcactctgcagcagcatgagcgtccgcctccctctcctgcttcgccagctcggccgccagcagctgccctcgggcccggcgtgtcgcctccgtgagctgtgtcgctcaggcagcagaagcagcagcagcggaggtggtgaccccgaggggttacgcgggcggcggctgcaggatggccaaaccttcagcagccatggcccaggcaatccggaagcccccgggatggactccatcgtcagagacgtcattcacaattccaaggaagtgctgagcttgttgcaagaaaagaaccctgcctttaagccagtgcttgcagttattcaggccggtgatgacaatttgatgaaggatatgaaccagaatttggccaaggaggctggtctggacatcactcacatctgcttgcctccagacagcggagaggatgagatcatagatgaaatcctgaagattaatgaagaccccagagtgcatggccttacccttcagatctctgaagattcattgagcaacaaagttctcaatgctttgaaaccagaaaaagatgtggacggggtgaccgacatcaatctggggaagctcgtacgaggtgacgctccggagtgttttgtttcacccttggccaaagctgctgtagaacttgttgaaaagtcagggatcactttggatggaaagaaggtcttggtcgtaggggcgcacgggcccctggaagctgccctgcagtggcttttccagagaaaaggatctatgacaatgagctgcccctgggcaacacctcagcttccagacaagcttcgagaggcagacattgtggtcttaggctcacctaagccagaagagattcctgctgtgtggattccatcaggaaccaccattctcaattgcttccatgacttcttgtcagggaagctgagcggaggttctcctggggtccccgtggacaaactcattgcagaagagagcgtgagtctccttgctgcggctctgcgcattcagaacatggtgagcagcggcaggaggtggctcagagagcagcaacatcgaagatggcgactgcactgcttgaaactgcagcctctctcacctgtgcccagtgatattgagatttctcgaggacagactccaaaagctgtggatgtccttgccaaggagataggattgcttgcagatgaaattgaaatctatggcaagagcaaagccaaagtccaattgtccctgctggagaggttaaaggatcaaacagatggaaaatacgtcttggttgctgggatcacgcccaccccgctcggagaagggaagagtacagtcaccatcggactagtgcaggcgctgaccgctcacctgaaagtcaactccttcgcctgtctgaggcagccttctcagggacccacttttggagtgaaaggaggagctgcaggaggtggatatgctcaggtcatccccatggaggagttcaaccttcacctgactggggacatccatgccatcactgccgctaataacttgctggccgcagccatcgacacgagaattttacatgagagcactcaaacagacaaggctctctacaatcgactggttcccttagtgaatggtgtcagagaattttcagaaattcaactttctcggctgaagaaactggggatacataagactgatccaagcacactgaccgaggaggaagtgaggaagttcgcccgcctcaacattgaccccgcaaccatcacgtggcagagagtattggacacgaacgaccgatttctgagaaaaataaccattggacagggaagtacagagaaaggatattcccggcaggcacagtttgacattgcagtggccagcgagatcatggccgtgctggccttgactgatagcctcacagacatgaaagagcggctaggaagaatggtggtggccagtgacaaagacgggcagcctgtgacagctgaggacttgggggtgaccggcgctctgacagttttgatgaaagacgccatcaagccaaatctgatgcagacccttgaaggaacacctgtgtttgtgcacgctggtccctttgccaacatcgctcacggcaactcatcagtattagctgataaaatcgcgctgaaattggtcggcgaagaagggtttgtggtgactgaagctggctttggggctgatattgggatggagaaattcttcaatatcaaatgccgagcttctggcctggtgcccaacgttgtcgtgctggtagccaccgttcgagctctgaagatgcatggaggcgggccgagtgtaactgctggggttcctctcaagaaagaatatacagaggaggtaagaagaactaatggtccagtgcagccaaacattcagctggtagctgatggctgctgcaacctacagaagcaaattcagatcgctcagctcttcggggtgccggtggtggtggcactgaatgtcttcaagacggacacccgtgcagagattgacttggtgtgtgagctcgctaaacgggccggtgcctttgatgcggtcccctgctatcactggtcggctggagggaaaggatctgtggacttggcccgggctgtgagagaagctgcgaataaaagaagccgcttccagttcctgtatgatgttcagcttcccatcgtggaaaagataagagtcattgcccagactgtctatggagccaaggacattgagctgtctcctgaggcgcagtccaaaatcgatcgctatacgcaacagggttttggaaatttgcccatttgcatggcgaagacccacctctctctctctcatgaacctgacaaaaagggagtgccgagggatttcactctgcccatcagtgatgtccgggccagcatcggggctgggttcatttatcctttggtgggaacgatgagcacaatgccaggactgcccacccgaccctgcttttatgatatagaccttgacacagaaacggagcaagttaaaggcttgttctaatggaatgaaacccacaggactgggcaagagtcttcaaacaaaaaacgtctccttgcctttttgctgcagttggagaagaaaatgaattttgaaatcttgtgatgcaatgctggagcaatcctgagacaggccaaagaccgcttcctcatacaagattaactctgtttccagccaagtggtgttcaacagaaggacctgcgccacatctggaaggagtgaagttactcttggttccgatagtgtttacaccatttctgctgcttatactttagaaagtttattttatggggactagggctttgcaagagtgtgaactaaaagctaatgcttccgtctttggagttttctctttcatcttttttattcttcctttcctcacctgtgttgaggatgggatgtcaggcctctgcttgcaccgtccagcgctgtgctgccaaactgtatttgtttttgtctttgaactgaaaataaacatgtgttc

SEQ ID NO: 1194 - protein, 983 aa, Mus musculus
MSVRLPLLLRQLGRQQLPSGPACRLRELCRSGSRSSSSGGGDPEGLRGRRLQDGQTFSSHGPGNPEAPGMDSIVRDVIHNSKEVLSLLQEKNPAFKPVLAVIQAGDDNLMKDMNQNLAKEAGLDITHICLPPDSGEDEIIDEILKINEDPRVHGLTLQISEDSLSNKVLNALKPEKDVDGVTDINLGKLVRGDAPECFVSPLAKAAVELVEKSGITLDGKKVLVVGAHGPLEAALQWLFQRKGSMTMSCPWATPQLPDKLREADIVVLGSPKPEEIPAVWIPSGTTILNCFHDFLSGKLSGGSPGVPVDKLIAEESVSLLAAALRIQNMVSSGRRWLREQQHRRWRLHCLKLQPLSPVPSDIEISRGQTPKAVDVLAKEIGLLADEIEIYGKSKAKVQLSLLERLKDQTDGKYVLVAGITPTPLGEGKSTVTIGLVQALTAHLKVNSFACLRQPSQGPTFGVKGGAAGGGYAQVIPMEEFNLHLTGDIHAITAANNLLAAAIDTRILHESTQTDKALYNRLVPLVNGVREFSEIQLSRLKKLGIHKTDPSTLTEEEVRKFARLNIDPATITWQRVLDTNDRFLRKITIGQGSTEKGYSRQAQFDIAVASEIMAVLALTDSLTDMKERLGRMVVASDKDGQPVTAEDLGVTGALTVLMKDAIKPNLMQTLEGTPVFVHAGPFANIAHGNSSVLADKIALKLVGEEGFVVTEAGFGADIGMEKFFNIKCRASGLVPNVVVLVATVRALKMHGGGPSVTAGVPLKKEYTEEVRRTNGPVQPNIQLVADGCCNLQKQIQIAQLFGVPVVVNVFKTDTRAEIDLVCELAKRAGAFDAVPCYHWSAGGKGSVDLARAVREAANKRSRFQFLYDVQLPIVEKIRVIAQTVYGAKDIELSPEAQSKIDRYTQQGFGNLPICMAKTHLSLSHEPDKKGVPRDFTLPISDVRASIGAGFIYPLVGTMSTMPGLPWCFYDIDLDTETEQVKGLF
